United States Patent Application Publication US 2022/0275367 A1 - sequence listing, part 2

SEQ ID NO: 1781 - protein, 735 aa, Artificial Sequence
  source: /note="Description of Artificial Sequence: Synthetic polypeptide"
MAADGYLPDWLEDNLSEGVREWWALQPGAPKPKANQQHQDNARGLVLPGYKYLGPGNGLDKGEPVNAADAAALEHDKAYDQQLKAGDNPYLKYNHADAEFQQRLQGDTSFGGNLGRAVFQAKKRVLEPLGLVEQAGETAPGKKRPLIESPQQPDSSTGIGKKGKQPAKKKLVFEDETGAGDGPPEGSTSGAMSDDSEMRAAAGGAAVEGGQGADGVGNASGDWHCDSTWSEGHVTTTSTRTWVLPTYNNHLYKRLGESLQSNTYNGFSTPWGYFDFNRFHCHFSPRDWQRLINNNWGMRPKAMRVKIFNIQVKEVTTSNGETTVANNLTSTVQIFADSSYELPYVMDAGQEGSLPPFPNDVFMVPQYGYCGLVTGNTSQQQTDRNAFYCLEYFPSQMLRTGNNFEITYSFEKVPFHSMYAHSQSLDRLMNPLIDQYLWGLQSTTTGTTLNAGTATTNFTKLRPTNFSNFKKNWLPGPSIKQQGFSKTANQNYKIPATGSDSLIKYETHSTLDGRWSALTPGPPMATAGPADSKFSNSQLIFAGPKQNGNTATVPGTLIFTSEEELAATNATDTDMWGNLPVRDFSLSNLPTVDRTTKLGAVPGMVWQNRDIYYQGPIWAKIPHTDGHFHPSPLIGGFGLKHPPPQIFIKNTPVPANPATTFSSTPVNSFITQYSTGQVSVQIDWEIQKERSKRWNPEVQFTSNYGQQNSLLWAPDAAGKYTEPRAIGTRYLTHHL

SEQ ID NO: 1782 - protein, 735 aa, Artificial Sequence
  source: /note="Description of Artificial Sequence: Synthetic polypeptide"
MAADGYLPDWLEDNLSEGVREWWALQPGAPKPKANQQHQDNARGLVLPGYKYLGPGNGLDKGEPVNAADAAALEHDKAYDQQLKAGDNPYLKYNHADAEFQQRLQGDTSFGGNLGRAVFQAKKRVLEPLGLVEQAGETAPGKKRPLIESPQQPDSSTGIGKKGKQPAKKKLVFEDETGAGDGPPEGSTSGAMSDDSEMRAAAGGAAVEGGQGADGVGNASGDWHCDSTWSEGHVTTTSTRTWVLPTYNNHLYKRLGESLQSNTYNGFSTPWGYFDFNRFHCHFSPRDWQRLINNNWGMRPKAMRVKIFNIQVKEVTTSNGETTVANNLTSTVQIFADSSYELPYVMDAGQEGSLPPFPNDVFMVPQYGYCGLVTGNTSQQQTDRNAFYCLEYFPSQMLRTGNNFEITYSFEKVPFHSMYAHSQSLDRLMNPLIDQYLWGLQSTTTGTTLNAGTATTNFTKLRPTNFSNFKKNWLPGPSIKQQGFSKTANQNYFIPATGSDSLIQYETHSTLDGRWSALTPGPPMATAGPADSKFSNSQLIFAGPKQNGNTATVPGTLIFTSEEELAATNATDTDMWGNLPGGDQSNSNLPTVDRLTALGAVPGMVWQNRDIYYQGPIWAKIPHTDGHFHPSPLIGGFGLKHPPPQIFIKNTPVPANPATTFSSTPVNSFITQYSTGQVSVQIDWEIQKERSKRWNPEVQFTSNYGQQNSLLWAPDAAGKYTEPRAIGTRYLTHHL

SEQ ID NO: 1783 - protein, 735 aa, Artificial Sequence
  source: /note="Description of Artificial Sequence: Synthetic polypeptide"
MAADGYLPDWLEDNLSEGVREWWALQPGAPKPKANQQHQDNARGLVLPGYKYLGPGNGLDKGEPVNAADAAALEHDKAYDQQLKAGDNPYLKYNHADAEFQQRLQGDTSFGGNLGRAVFQAKKRVLEPLGLVEQAGETAPGKKRPLIESPQQPDSSTGIGKKGKQPAKKKLVFEDETGAGDGPPEGSTSGAMSDDSEMRAAAGGAAVEGGQGADGVGNASGDWHCDSTWSEGHVTTTSTRTWVLPTYNNHLYKRLGESLQSNTYNGFSTPWGYFDFNRFHCHFSPRDWQRLINNNWGMRPKAMRVKIFNIQVKEVTTSNGETTVANNLTSTVQIFADSSYELPYVMDAGQEGSLPPFPNDVFMVPQYGYCGLVTGNTSQQQTDRNAFYCLEYFPSQMLRTGNNFEITYSFEKVPFHSMYAHSQSLDRLMNPLIDQYLWGLQSTTTGTTLNAGTATTNFTKLRPTNFSNFKKNWLPGPSIKQQGFSKTANQNYEMPATGSDSLIIYETHSTLDGRWSALTPGPPFATAGPADSKFSNSQLIFAGPKQNGNTATVPGTLIFTSEEELAATNATDTDVWGNLPSGDHSQSNLPTVDRPTMLGAVPGMVWQNRDIYYQGPIWAKIPHTDGHFHPSPLIGGFGLKHPPPQIFIKNTPVPANPATTFISTPVNSFITQYSTGQVSVHIDWEIQKERSKRWNPEVQFTSDYGQHSSLLWAPDAAGKYTEPTAIGTRYLTHHL

SEQ ID NO: 1784 - protein, 734 aa, Artificial Sequence
  source: /note="Description of Artificial Sequence: Synthetic polypeptide"
MAADGYLPDWLEDNLSEGVREWWALQPGAPKPKANQQHQDNARGLVLPGYKYLGPGNGLDKGEPVNAADAAALEHDKAYDQQLKAGDNPYLKYNHADAEFQQRLQGDTSFGGNLGRAVFQAKKRVLEPLGLVEQAGETAPGKKRPLIESPQQPDSSTGIGKKGKQPAKKKLVFEDETGAGDGPPEGSTSGAMSDDSEMRAAAGGAAVEGGQGADGVGNASGDWHCDSTWSEGHVTTTSTRTWVLPTYNNHLYKRLGESLQSNTYNGFSTPWGYFDFNRFHCHFSPRDWQRLINNNWGMRPKAMRVKIFNIQVKEVTTSNGETTVANNLTSTVQIFADSSYELPYVMDAGQEGSLPPFPNDVFMVPQYGYCGLVTGNTSQQQTDRNAFYCLEYFPSQMLRTGNNFEITYSFEKVPFHSMYAHSQSLDRLMNPLIDQYLWGLQSTTTGTTLNAGTATTNFTKLRPTNFSNFKKNWLPGPSIKQQGFSKTANQNDIPATGSDSLIKYETHSTLDGRWSALTPGPPMATAGPADSKFSNSQLIFAGPKQNGNTATVPGTLIFTSEEELAATNATDTDMWGNLPGGDQSNSNLPTVDRLTALGAVPGMVWQNRDIYYQGPIWAKIPHTDGHFHPSPLIGGFGLKHPPPQIFIKNTPVPANPATTFSSTPVNSFITQYSTGQVSVQIDWEIQKERSKRWNPEVQFTSNYGQQNSLLWAPDAAGKYTEPRAIGTRYLTHHL

SEQ ID NO: 1785 - protein, 735 aa, Artificial Sequence
  source: /note="Description of Artificial Sequence: Synthetic polypeptide"
MAADGYLPDWLEDNLSEGVREWWALQPGAPKPKANQQHQDNARGLVLPGYKYLGPGNGLDKGEPVNAADAAALEHDKAYDQQLKAGDNPYLKYNHADAEFQQRLQGDTSFGGNLGRAVFQAKKRVLEPLGLVEQAGETAPGKKRPLIESPQQPDSSTGIGKKGKQPAKKKLVFEDETGAGDGPPEGSTSGAMSDDSEMRAAAGGAAVEGGQGADGVGNASGDWHCDSTWSEGHVTTTSTRTWVLPTYNNHLYKRLGESLQSNTYNGFSTPWGYFDFNRFHCHFSPRDWQRLINNNWGMRPKAMRVKIFNIQVKEVTTSNGETTVANNLTSTVQIFADSSYELPYVMDAGQEGSLPPFPNDVFMVPQYGYCGLVTGNTSQQQTDRNAFYCLEYFPSQMLRTGNNFEITYSFEKVPFHSMYAHSQSLDRLMNPLIDQYLWGLQSTTTGTTLNAGTATTNFTKLRPTNFSNFKKNWLPGPSIKQQGFSKTANQNYIIPATGSDSLITYETHSTLDGRWSALTPGPPVATAGPADSKFSNSQLIFAGPKQNGNTATVPGTLIFTSEEELAATNATDTDMWGNLPFNDDSSSNLPTVDRSTFLGAVPGMVWQNRDIYYQGPIWAKIPHTDGHFHPSPLIGGFGLKHPPPQIFIKNTPVPANPATTFSSTPVNSFITQYSTGQVSVQIDWEIQKERSKRWNPEVQFTSNYGQQNSLLWAPDAAGKYTEPRAIGTRYLTHHL

SEQ ID NO: 1786 - protein, 733 aa, Artificial Sequence
  source: /note="Description of Artificial Sequence: Synthetic polypeptide"
MAADGYLPDWLEDNLSEGIREWWDLKPGAPKPKANQQKQDDGRGLVLPGYKYLGPFNGLDKGEPVNAADAAALEHDKAYDQQLKAGDNPYLRYNHADAEFQERLQEDTSFGGNLGRAVFQAKKRVLEPLGLVEEGAKTAPGKKRPLESPQEPDSSSGIGKKGKQPARKRLNFEEDTGAGDGPPEGSDTSAMSSDIEMRAAPGGNAVDAGQGSDGVGNASGDWHCDSTWSEGKVTTTSTRTWVLPTYNNHLYLRLGTTSSSNTYNGFSTPWGYFDFNRFHCHFSPRDWQRLINNNWGLRPKAMRVKIFNIQVKEVTTSNGETTVANNLTSTVQIFADSSYELPYVMDAGQEGSLPPFPNDVFMVPQYGYCGIVTGENQNQTDRNAFYCLEYFPSQMLRTGNNFEMAYNFEKVPFHSMYAHSQSLDRLMNPLLDQYLWHLQSTTSGETLNQGNAATTFGKIRSGDFAFYRKNWLPGPCVKQQRFSKTASQNYKIPASGGNALLKYDTHYTLNNRWSNIAPGPPMATAGPSDGDFSNAQLIFPGPSVTGNTTTSANNLLFTSEEEIAATNPRDTDMFGQIADNNQNATTAPITGNVTAMGVLPGMVWQNRDIYYQGPIWAKIPHADGHFHPSPLIGGFGLKHPPPQIFIKNTPVPANPATTFTAARVDSFITQYSTGQVAVQIEWEIEKERSKRWNPEVQFTSNYGNQSSMLWAPDTTGKYTEPRVIGSRYLTNHL

SEQ ID NO: 1787 - protein, 742 aa, Artificial Sequence; identical to SEQ ID NO: 1598
  source: /note="Description of Artificial Sequence: Synthetic polypeptide"

SEQ ID NO: 1788 - protein, 733 aa, Artificial Sequence; identical to SEQ ID NO: 421
  source: /note="Description of Artificial Sequence: Synthetic polypeptide"

SEQ ID NO: 1789 - protein, 733 aa, Artificial Sequence; identical to SEQ ID NO: 138
  source: /note="Description of Artificial Sequence: Synthetic polypeptide"

SEQ ID NO: 1790 - protein, 733 aa, Artificial Sequence; identical to SEQ ID NO: 425
  source: /note="Description of Artificial Sequence: Synthetic polypeptide"

SEQ ID NO: 1791 - protein, 735 aa, Artificial Sequence
  source: /note="Description of Artificial Sequence: Synthetic polypeptide"
MAADGYLPDWLEDNLSEGVREWWALQPGAPKPKANQQHQDNARGLVLPGYKYLGPGNGLDKGEPVNAADAAALEHDKAYDQQLKAGDNPYLKYNHADAEFQQRLQGDTSFGGNLGRAVFQAKKRVLEPLGLVEQAGETAPGKKRPLIESPQQPDSSTGIGKKGKQPAKKKLVFEDETGAGDGPPEGSTSGAMSDDSEMRAAAGGAAVEGGQGADGVGNASGDWHCDSTWSEGHVTTTSTRTWVLPTYNNHLYKRLGESLQSNTYNGFSTPWGYFDFNRFHCHFSPRDWQRLINNNWGMRPKAMRVKIFNIQVKEVTTSNGETTVANNLTSTVQIFADSSYELPYVMDAGQEGSLPPFPNDVFMVPQYGYCGLVTGNTSQQQTDRNAFYCLEYFPSQMLRTGNNFEITYSFEKVPFHSMYAHSQSLDRLMNPLIDQYLWGLQSTTTGTTLNAGTATTNFTKLRPTNFSNFKKNWLPGPSIKQQGFSKTANQNYEIPATGSDSLIEYETHSTLDGRWSALTPGPPMATAGPADSKFSNSQLIFAGPKQNGNTATVPGTLIFTSEEELAATNATDTDMWGNLPGGDQSSSNLPTVDRLTALGAVPGMVWQNRDIYYQGPIWAKIPHTDGHFHPSPLIGGFGLKHPPPQIFIKNTPVPANPATTFSSTPVNSFITQYSTGQVSVQIDWEIQKERSKRWNPEVQFTSNYGQQNSLLWAPDAAGKYTEPRAIGTRYLTHHL

SEQ ID NO: 1792 - protein, 735 aa, Artificial Sequence
  source: /note="Description of Artificial Sequence: Synthetic polypeptide"
MAADGYLPDWLEDNLSEGVREWWALQPGAPKPKANQQHQDNARGLVLPGYKYLGPGNGLDKGEPVNAADAAALEHDKAYDQQLKAGDNPYLKYNHADAEFQQRLQGDTSFGGNLGRAVFQAKKRVLEPLGLVEQAGETAPGKKRPLIESPQQPDSSTGIGKKGKQPAKKKLVFEDETGAGDGPPEGSTSGAMSDDSEMRAAAGGAAVEGGQGADGVGNASGDWHCDSTWSEGHVTTTSTRTWVLPTYNNHLYKRLGESLQSNTYNGFSTPWGYFDFNRFHCHFSPRDWQRLINNNWGMRPKAMRVKIFNIQVKEVTTSNGETTVANNLTSTVQIFADSSYELPYVMDAGQEGSLPPFPNDVFMVPQYGYCGLVTGNTSQQQTDRNAFYCLEYFPSQMLRTGNNFEITYSFEKVPFHSMYAHSQSLDRLMNPLIDQYLWGLQSTTTGTTLNAGTATTNFTKLRPTNFSNFKKNWLPGPSIKQQGFSKTANQNYEIPATGSDSLIEYETHSTLDGRWSALTPGPPMATAGPADSKFSNSQLIFAGPKQNGNTATVPGTLIFTSEEELAATNATDTDMWGNLPGGDQSSSNLPVVRGLRALGAVPGMVWQNRDIYYQGPIWAKIPHTDGHFHPSPLIGGFGLKHPPPQIFIKNTPVPANPATTFSSTPVNSFITQYSTGQVSVQIDWEIQKERSKRWNPEVQFTSNYGQQNSLLWAPDAAGKYTEPRAIGTRYLTHHL

SEQ ID NO: 1793 - protein, 735 aa, Artificial Sequence
  source: /note="Description of Artificial Sequence: Synthetic polypeptide"
MAADGYLPDWLEDNLSEGVREWWALQPGAPKPKANQQHQDNARGLVLPGYKYLGPGNGLDKGEPVNAADAAALEHDKAYDQQLKAGDNPYLKYNHADAEFQQRLQGDTSFGGNLGRAVFQAKKRVLEPLGLVEQAGETAPGKKRPLIESPQQPDSSTGIGKKGKQPAKKKLVFEDETGAGDGPPEGSTSGAMSDDSEMRAAAGGAAVEGGQGADGVGNASGDWHCDSTWSEGHVTTTSTRTWVLPTYNNHLYKRLGESLQSNTYNGFSTPWGYFDFNRFHCHFSPRDWQRLINNNWGMRPKAMRVKIFNIQVKEVTTSNGETTVANNLTSTVQIFADSSYELPYVMDAGQEGSLPPFPNDVFMVPQYGYCGLVTGNTSQQQTDRNAFYCLEYFPSQMLRTGNNFEITYSFEKVPFHSMYAHSQSLDRLMNPLIDQYLWGLQSTTTGTTLNAGTATTNFTKLRPTNFSNFKKNWLPGPSIKQQGFSKTANQNYEIPATGSDSLIEYETHSTLDGRWSALTPGPPMATAGPADSKFSNSQLIFAGPKQNGNTATVPGTLIFTSEEELAATNATDTDMWGNLPGGDQSSSNLPVVNRLSALGAVPGMVWQNRDIYYQGPIWAKIPHTDGHFHPSPLIGGFGLKHPPPQIFIKNTPVPANPATTFSSTPVNSFITQYSTGQVSVQIDWEIQKERSKRWNPEVQFTSNYGQQNSLLWAPDAAGKYTEPRAIGTRYLTHHL

SEQ ID NO: 1794 - protein, 735 aa, Artificial Sequence
  source: /note="Description of Artificial Sequence: Synthetic polypeptide"
MAADGYLPDWLEDNLSEGVREWWALQPGAPKPKANQQHQDNARGLVLPGYKYLGPGNGLDKGEPVNAADAAALEHDKAYDQQLKAGDNPYLKYNHADAEFQQRLQGDTSFGGNLGRAVFQAKKRVLEPLGLVEQAGETAPGKKRPLIESPQQPDSSTGIGKKGKQPAKKKLVFEDETGAGDGPPEGSTSGAMSDDSEMRAAAGGAAVEGGQGADGVGNASGDWHCDSTWSEGHVTTTSTRTWVLPTYNNHLYKRLGESLQSNTYNGFSTPWGYFDFNRFHCHFSPRDWQRLINNNWGMRPKAMRVKIFNIQVKEVTTSNGETTVANNLTSTVQIFADSSYELPYVMDAGQEGSLPPFPNDVFMVPQYGYCGLVTGNTSQQQTDRNAFYCLEYFPSQMLRTGNNFEITYSFEKVPFHSMYAHSQSLDRLMNPLIDQYLWGLQSTTTGTTLNAGTATTNFTKLRPTNFSNFKKNWLPGPSIKQQGFSKTANQNYEIPATGSDSLIEYETHSTLDGRWSALTPGPPMATAGPADSKFSNSQLIFAGPKQNGNTATVPGTLIFTSEEELAATNATDTDMWGNLPGGDQSSSNLPPVMGLGALGAVPGMVWQNRDIYYQGPIWAKIPHTDGHFHPSPLIGGFGLKHPPPQIFIKNTPVPANPATTFSSTPVNSFITQYSTGQVSVQIDWEIQKERSKRWNPEVQFTSNYGQQNSLLWAPDAAGKYTEPRAIGTRYLTHHL

SEQ ID NO: 1795 - protein, 736 aa, Artificial Sequence
  source: /note="Description of Artificial Sequence: Synthetic polypeptide"
MAADGYLPDWLEDNLSEGVREWWALQPGAPKPKANQQHQDNARGLVLPGYKYLGPGNGLDKGEPVNAADAAALEHDKAYDQQLKAGDNPYLKYNHADAEFQQRLQGDTSFGGNLGRAVFQAKKRVLEPLGLVEQAGETAPGKKRPLIESPQQPDSSTGIGKKGKQPAKKKLVFEDETGAGDGPPEGSTSGAMSDDSEMRAAAGGAAVEGGQGADGVGNASGDWHCDSTWSEGHVTTTSTRTWVLPTYNNHLYKRLGESLQSNTYNGFSTPWGYFDFNRFHCHFSPRDWQRLINNNWGMRPKAMRVKIFNIQVKEVTTSNGETTVANNLTSTVQIFADSSYELPYVMDAGQEGSLPPFPNDVFMVPQYGYCGLVTGNTSQQQTDRNAFYCLEYFPSQMLRTGNNFEITYSFEKVPFHSMYAHSQSLDRLMNPLIDQYLWGLQSTTTGTTLNAGTATTNFTKLRPTNFSNFKKNWLPGPSIKQQGFSKTANQNYEIPATGSDSLIEYETHSTLDGRWSALTPGPPMATAGPADSKFSNSQLIFAGPKQNGNTATVPGTLIFTSEEELAATNATDTDMWGNLPGGDQSRVDRLPTVDRLTALGAVPGMVWQNRDIYYQGPIWAKIPHTDGHFHPSPLIGGFGLKHPPPQIFIKNTPVPANPATTFSSTPVNSFITQYSTGQVSVQIDWEIQKERSKRWNPEVQFTSNYGQQNSLLWAPDAAGKYTEPRAIGTRYLTHHL

SEQ ID NO: 1796 - protein, 736 aa, Artificial Sequence
  source: /note="Description of Artificial Sequence: Synthetic polypeptide"
MAADGYLPDWLEDNLSEGVREWWALQPGAPKPKANQQHQDNARGLVLPGYKYLGPGNGLDKGEPVNAADAAALEHDKAYDQQLKAGDNPYLKYNHADAEFQQRLQGDTSFGGNLGRAVFQAKKRVLEPLGLVEQAGETAPGKKRPLIESPQQPDSSTGIGKKGKQPAKKKLVFEDETGAGDGPPEGSTSGAMSDDSEMRAAAGGAAVEGGQGADGVGNASGDWHCDSTWSEGHVTTTSTRTWVLPTYNNHLYKRLGESLQSNTYNGFSTPWGYFDFNRFHCHFSPRDWQRLINNNWGMRPKAMRVKIFNIQVKEVTTSNGETTVANNLTSTVQIFADSSYELPYVMDAGQEGSLPPFPNDVFMVPQYGYCGLVTGNTSQQQTDRNAFYCLEYFPSQMLRTGNNFEITYSFEKVPFHSMYAHSQSLDRLMNPLIDQYLWGLQSTTTGTTLNAGTATTNFTKLRPTNFSNFKKNWLPGPSIKQQGFSKTANQNYEIPATGSDSLIEYETHSTLDGRWSALTPGPPMATAGPADSKFSNSQLIFAGPKQNGNTATVPGTLIFTSEEELAATNATDTDMWGNLPGGDQSRALRLPTVDRLTALGAVPGMVWQNRDIYYQGPIWAKIPHTDGHFHPSPLIGGFGLKHPPPQIFIKNTPVPANPATTFSSTPVNSFITQYSTGQVSVQIDWEIQKERSKRWNPEVQFTSNYGQQNSLLWAPDAAGKYTEPRAIGTRYLTHHL

SEQ ID NO: 1797 - DNA, 1172 bp, Artificial Sequence
  source: /note="Description of Artificial Sequence: Synthetic polynucleotide"
cttaattaggctgcgcgctcgctcgctcactgaggccgcccgggcaaagcccgggcgtcgggcgacctttggtcgcccggcctcagtgagcgagcgagcgcgcagagagggagtggccaactccatcactaggggttccttgtagttaatgattaacccgccatgctacttatctaccagggtaatggggatcctctagaactatagctagtcgacattgattattgactagttattaatagtaatcaattacggggtcattagttcatagcccatatatggagttccgcgttacataacttacggtaaatggcccgcctggctgaccgcccaacgacccccgcccattgacgtcaataatgacgtatgttcccatagtaacgccaatagggactttccattgacgtcaatgggtggactatttacggtaaactgcccacttggcagtacatcaagtgtatcatatgccaagtacgccccctattgacgtcaatgacggtaaatggcccgcctggcattatgcccagtacatgaccttatgggactttcctacttggcagtacatctacgtattagtcatcgctattaccatgtcgaggccacgttctgcttcactctccccatctcccccccctccccacccccaattttgtatttatttattttttaattattttgtgcagcgatgggggcggggggggggggcgcgcgccaggcggggcggggcggggcgaggggcggggcggggcgaggcggagaggtgcggcggcagccaatcagagcggcgcgctccgaaagtttccttttatggcgaggcggcggcggcggcggccctataaaaagcgaagcgcgcggcgggcgggagcaagctttattgcggtagtttatcacagttaaattgctaacgcagtcagtgcttctgacacaacagtctcgaacttaagctgcagaagttggtcgtgaggcactgggcaggtaagtatcaaggttacaagacaggtttaaggagaccaatagaaactgggcttgtcgagacagagaagactcttgcgtttctgataggcacctattggtcttactgacatccactttgcctttctctccacaggtgtccactcccagttcaattacagctcttaaggctagagtacttaatacgactcsactatagg

SEQ ID NO: 1798 - DNA, 3231 bp, Artificial Sequence
  source: /note="Description of Artificial Sequence: Synthetic polynucleotide"
taagaattcacgcgtggtacctctagagtcgacccgggcggcctcgaggacggggtgaactacgcctgaggatccgatctttttccctctgccaaaaattatggggacatcatgaagccccttgagcatctgacttctggctaataaaggaaatttattttcattgcaatagtgtgttggaattttttgtgtctctcactcggaagcaattcgttgatctgaatttcgaccacccataatacccattaccctggtagataagtagcatggcgggttaatcattaactacaaggaacccctagtgatggagttggccactccctctctgcgcgctcgctcgctcactgaggccgggcgaccaaaggtcgcccgacgcccgggctttgcccgggcggcctcagtgagcgagcgagcgcgcagccttaattaacctaattcactggccgtcgttttacaacgtcgtgactgggaaaaccctggcgttacccaacttaatcgccttgcagcacatccccctttcgccagctggcgtaatagcgaagaggcccgcaccgatcgcccttcccaacagttgcgcagcctgaatggcgaatgggacgcgccctgtagcggcgcattaagcgcggcgggtgtggtggttacgcgcagcgtgaccgctacacttgccagcgccctagcgcccgctcctttcgctttcttcccttcctttctcgccacgttcgccggctttccccgtcaagctctaaatcgggggctccctttagggttccgatttagtgctttacggcacctcgaccccaaaaaacttgattagggtgatggttcacgtagtgggccatcgccctgatagacggtttttcgccctttgacgttggagtccacgttctttaatagtggactcttgttccaaactggaacaacactcaaccctatctcggtctattcttttgatttataagggattttgccgatttcggcctattggttaaaaaatgagctgatttaacaaaaatttaacgcgaattttaacaaaatattaacgcttacaatttaggtggcacttttcggggaaatgtgcgcggaacccctatttgtttatttttctaaatacattcaaatatgtatccgctcatgagacaataaccctgataaatgcttcaataatattgaaaaaggaagagtatgagtattcaacatttccgtgtcgcccttattcccttttttgcggcattttgccttcctgtttttgctcacccagaaacgctggtgaaagtaaaagatgctgaagatcagttgggtgcacgagtgggttacatcgaactggatctcaacagcggtaagatccttgagagttttcgccccgaagaacgttttccaatgatgagcacttttaaagttctgctatgtggcgcggtattatcccgtattgacgccgggcaagagcaactcggtcgccgcatacactattctcagaatgacttggttgagtactcaccagtcacagaaaagcatcttacggatggcatgacagtaagagaattatgcagtgctgccataaccatgagtgataacactgcggccaacttacttctgacaacgatcggaggaccgaaggagctaaccgcttttttgcacaacatgggggatcatgtaactcgccttgatcgttgggaaccggagctgaatgaagccataccaaacgacgagcgtgacaccacgatgcctgtagcaatggcaacaacgttgcgcaaactattaactggcgaactacttactctagcttcccggcaacaattaatagactggatggaggcggataaagttgcaggaccacttctgcgctcggcccttccggctggctggtttattgctgataaatctggagccggtgagcgtgggtctcgcggtatcattgcagcactggggccagatggtaagccctcccgtatcgtagttatctacacgacggggagtcaggcaactatggatgaacgaaatagacagatcgctgagataggtgcctcactgattaagcattggtaactgtcagaccaagtttactcatatatactttagattgatttaaaacttcatttttaatttaaaaggatctaggtgaagatcctttttgataatctcatgaccaaaatcccttaacgtgagttttcgttccactgagcgtcagaccccgtagaaaagatcaaaggatcttcttgagatcctttttttctgcgcgtaatctgctgcttgcaaacaaaaaaaccaccgctaccagcggtggtttgtttgccggatcaagagctaccaactctttttccgaaggtaactggcttcagcagagcgcagataccaaatactgttcttctagtgtagccgtagttaggccaccacttcaagaactctgtagcaccgcctacatacctcgctctgctaatcctgttaccagtggctgctgccagtggcgataagtcgtgtcttaccgggttggactcaagacgatagttaccggataaggcgcagcggtcgggctgaacggggggttcgtgcacacagcccagcttggagcgaacgacctacaccgaactgagatacctacagcgtgagctatgagaaagcgccacgcttcccgaagggagaaaggcggacaggtatccggtaagcggcagggtcggaacaggagagcgcacgagggagcttccagggggaaacgcctggtatctttatagtcctgtcgggtttcgccacctctgacttgagcgtcgatttttgtgatgctcgtcaggggggcggagcctatggaaaaacgccagcaacgcggcctttttacggttcctggccttttgctggccttttgctcacatgttctttcctgcgttatcccctgattctgtggataaccgtattaccgcctttgagtgagctgataccgctcgccgcagccgaacgaccgagcgcagcgagtcagtgagcgaggaagcggaagagcgcccaatacgcaaaccgcctctccccgcgcgttggccgattcattaatgcagctggcacgacaggtttcccgactggaaagcgggcagtgagcgcaacgcaattaatgtgagttagctcactcattaggcaccccaggctttacactttatgcttccggctcgtatgttgtgtggaattgtgagcggataacaatttcacacaggaaacagctatgaccatgattacgccagatttaattaaggc

SEQ ID NO: 1799 - protein, 737 aa, Artificial Sequence
  source: /note="Description of Artificial Sequence: Synthetic polypeptide"
  MOD_RES (264)..(264): Any naturally occurring amino acid
  MOD_RES (266)..(266): Any naturally occurring amino acid
  MOD_RES (268)..(268): Any naturally occurring amino acid
  MOD_RES (448)..(448): Any naturally occurring amino acid
  MOD_RES (459)..(460): Any naturally occurring amino acid
  MOD_RES (467)..(467): Any naturally occurring amino acid
  MOD_RES (470)..(471): Any naturally occurring amino acid
  MOD_RES (474)..(474): Any naturally occurring amino acid
  MOD_RES (495)..(495): Any naturally occurring amino acid
  MOD_RES (516)..(516): Any naturally occurring amino acid
  MOD_RES (533)..(533): Any naturally occurring amino acid
  MOD_RES (547)..(547): Any naturally occurring amino acid
  MOD_RES (551)..(551): Any naturally occurring amino acid
  MOD_RES (555)..(555): Any naturally occurring amino acid
  MOD_RES (557)..(557): Any naturally occurring amino acid
  MOD_RES (561)..(561): Any naturally occurring amino acid
  MOD_RES (563)..(563): Any naturally occurring amino acid
  MOD_RES (577)..(577): Any naturally occurring amino acid
  MOD_RES (583)..(583): Any naturally occurring amino acid
  MOD_RES (593)..(593): Any naturally occurring amino acid
  MOD_RES (596)..(596): Any naturally occurring amino acid
  MOD_RES (661)..(662): Any naturally occurring amino acid
  MOD_RES (664)..(665): Any naturally occurring amino acid
  MOD_RES (710)..(710): Any naturally occurring amino acid
  MOD_RES (717)..(719): Any naturally occurring amino acid
  MOD_RES (723)..(723): Any naturally occurring amino acid
MAADGYLPDWLEDNLSEGIREWWDLKPGAPKPKANQQKQDDGRGLVLPGYKYLGPFNGLDKGEPVNAADAAALEHDKAYDQQLKAGDNPYLRYNHADAEFQERLQEDTSFGGNLGRAVFQAKKRVLEPLGLVEEGAKTAPGKKRPVEPSPQRSPDSSTGIGKKGQQPAKKRLNFGQTGDSESVPDPQPLGEPPAGPSGLGSGTMAAGGGAPMADNNEGADGVGNASGNWHCDSTWLGDRVITTSTRTWALPTYNNHLYKQISSXSXGXTNDNHYFGYSTPWGYFDFNRFHCHFSPRDWQRLINNNWGFRPKRLNFKLFNIQVKEVTTNDGVTTIANNLTSTVQVFSDSEYQLPYVLGSAHQGCLPPFPADVFMIPQYGYLTLNNGSQAVGRSSFYCLEYFPSQMLRTGNNFTFSYTFEDVPFHSSYAHSQSLDRLMNPLIDQYLYYLXRTQSTGGTAGXXELLFSQXGPXXMSXQAKNWLPGPCYRQQRVSKTLXQNNNSNFAWTGATKYHLNGRXSLVNPGVAMATHKDDEXRFFPSSGVLIFGKXGAGXNNTXLXNVMXTXEEEIKTTNPVATEXYGVVAXNLQSSNTAPXTGXVNSQGALPGMVWQNRDVYLQGPIWAKIPHTDGNFHPSPLMGGFGLKHPPPQILIKNTPVPANPPXXFXXAKFASFITQYSTGQVSVEIEWELQKENSKRWNPEIQYTSNYAKSXNVDFAVXXXGVYXEPRPIGTRYLTRNL

SEQ ID NO: 1800 - protein, 737 aa, Artificial Sequence
  source: /note="Description of Artificial Sequence: Synthetic polypeptide"
MAADGYLPDWLEDNLSEGIREWWDLKPGAPKPKANQQKQDDGRGLVLPGYKYLGPFNGLDKGEPVNAADAAALEHDKAYDQQLKAGDNPYLRYNHADAEFQERLQEDTSFGGNLGRAVFQAKKRVLEPLGLVEEGAKTAPGKKRPVEPSPQRSPDSSTGIGKKGQQPAKKRLNFGQTGDSESVPDPQPLGEPPAGPSGLGSGTMAAGGGAPMADNNEGADGVGNASGNWHCDSTWLGDRVITTSTRTWALPTYNNHLYKQISSASSGSTNDNHYFGYSTPWGYFDFNRFHCHFSPRDWQRLINNNWGFRPKRLNFKLFNIQVKEVTTNDGVTTIANNLTSTVQVFSDSEYQLPYVLGSAHQGCLPPFPADVFMIPQYGYLTLNNGSQAVGRSSFYCLEYFPSQMLRTGNNFTFSYTFEDVPFHSSYAHSQSLDRLMNPLIDQYLYYLARTQSTGGTAGNRELLFSQGGPSNMSAQAKNWLPGPCYRQQRVSKTLAQNNNSNFAWTGATKYHLNGRDSLVNPGVAMATHKDDEDRFFPSSGVLIFGKEGAGANNTALENVMLTNEEEIKTTNPVATEQYGVVASNLQSSNTAPATGAVNSQGALPGMVWQNRDVYLQGPIWAKIPHTDGNFHPSPLMGGFGLKHPPPQILIKNTPVPANPPATFTPAKFASFITQYSTGQVSVEIEWELQKENSKRWNPEIQYTSNYAKSTNVDFAVNNEGVYSEPRPIGTRYLTRNL

SEQ ID NO: 1801 - protein, 737 aa, Artificial Sequence
  source: /note="Description of Artificial Sequence: Synthetic polypeptide"
MAADGYLPDWLEDNLSEGIREWWDLKPGAPKPKANQQKQDDGRGLVLPGYKYLGPFNGLDKGEPVNAADAAALEHDKAYDQQLKAGDNPYLRYNHADAEFQERLQEDTSFGGNLGRAVFQAKKRVLEPLGLVEEGAKTAPGKKRPVEPSPQRSPDSSTGIGKKGQQPAKKRLNFGQTGDSESVPDPQPLGEPPAGPSGLGSGTMAAGGGAPMADNNEGADGVGNASGNWHCDSTWLGDRVITTSTRTWALPTYNNHLYKQISSQSSGSTNDNHYFGYSTPWGYFDFNRFHCHFSPRDWQRLINNNWGFRPKRLNFKLFNIQVKEVTTNDGVTTIANNLTSTVQVFSDSEYQLPYVLGSAHQGCLPPFPADVFMIPQYGYLTLNNGSQAVGRSSFYCLEYFPSQMLRTGNNFTFSYTFEDVPFHSSYAHSQSLDRLMNPLIDQYLYYLSRTQSTGGTAGNRELLFSQGGPANMSAQAKNWLPGPCYRQQRVSKTLSQNNNSNFAWTGATKYHLNGRDSLVNPGVAMATHKDDEERFFPSSGVLIFGKQGAGANNTTLDNVMMTSEEEIKTTNPVATEQYGVVASNLQSSNTAPQTGTVNSQGALPGMVWQNRDVYLQGPIWAKIPHTDGNFHPSPLMGGFGLKHPPPQILIKNTPVPANPPAVFSPAKFASFITQYSTGQVSVEIEWELQKENSKRWNPEIQYTSNYAKSTNVDFAVNSEGVYSEPRPIGTRYLTRNL

SEQ ID NO: 1802 - protein, 737 aa, Artificial Sequence
  source: /note="Description of Artificial Sequence: Synthetic polypeptide"
MAADGYLPDWLEDNLSEGIREWWDLKPGAPKPKANQQKQDDGRGLVLPGYKYLGPFNGLDKGEPVNAADAAALEHDKAYDQQLKAGDNPYLRYNHADAEFQERLQEDTSFGGNLGRAVFQAKKRVLEPLGLVEEGAKTAPGKKRPVEPSPQRSPDSSTGIGKKGQQPAKKRLNFGQTGDSESVPDPQPLGEPPAGPSGLGSGTMAAGGGAPMADNNEGADGVGNASGNWHCDSTWLGDRVITTSTRTWALPTYNNHLYKQISSASSGSTNDNHYFGYSTPWGYFDFNRFHCHFSPRDWQRLINNNWGFRPKRLNFKLFNIQVKEVTTNDGVTTIANNLTSTVQVFSDSEYQLPYVLGSAHQGCLPPFPADVFMIPQYGYLTLNNGSQAVGRSSFYCLEYFPSQMLRTGNNFTFSYTFEDVPFHSSYAHSQSLDRLMNPLIDQYLYYLARTQSTGGTAGTRELLFSQGGPSNMSAQAKNWLPGPCYRQQRVSKTLTQNNNSNFAWTGATKYHLNGRDSLVNPGVAMATHKDDEDRFFPSSGVLIFGKQGAGANNTALDNVMITNEEEIKTTNPVATEQYGVVASNLQSSNTAPATGTVNSQGALPGMVWQNRDVYLQGPIWAKIPHTDGNFHPSPLMGGFGLKHPPPQILIKNTPVPANPPTVFSPAKFASFITQYSTGQVSVEIEWELQKENSKRWNPEIQYTSNYAKSTNVDFAVNSEGVYTEPRPIGTRYLTRNL

SEQ ID NO: 1803 - protein, 737 aa, Artificial Sequence
  source: /note="Description of Artificial Sequence: Synthetic polypeptide"
  MOD_RES (264)..(264): Any naturally occurring amino acid
  MOD_RES (448)..(448): Any naturally occurring amino acid
  MOD_RES (459)..(459): Any naturally occurring amino acid
  MOD_RES (470)..(470): Any naturally occurring amino acid
  MOD_RES (495)..(495): Any naturally occurring amino acid
  MOD_RES (533)..(533): Any naturally occurring amino acid
  MOD_RES (547)..(547): Any naturally occurring amino acid
  MOD_RES (555)..(555): Any naturally occurring amino acid
  MOD_RES (557)..(557): Any naturally occurring amino acid
  MOD_RES (561)..(561): Any naturally occurring amino acid
  MOD_RES (563)..(563): Any naturally occurring amino acid
  MOD_RES (593)..(593): Any naturally occurring amino acid
  MOD_RES (596)..(596): Any naturally occurring amino acid
  MOD_RES (661)..(662): Any naturally occurring amino acid
  MOD_RES (664)..(664): Any naturally occurring amino acid
  MOD_RES (718)..(718): Any naturally occurring amino acid
  MOD_RES (723)..(723): Any naturally occurring amino acid
MAADGYLPDWLEDNLSEGIREWWDLKPGAPKPKANQQKQDDGRGLVLPGYKYLGPFNGLDKGEPVNAADAAALEHDKAYDQQLKAGDNPYLRYNHADAEFQERLQEDTSFGGNLGRAVFQAKKRVLEPLGLVEEGAKTAPGKKRPVEPSPQRSPDSSTGIGKKGQQPAKKRLNFGQTGDSESVPDPQPLGEPPAGPSGLGSGTMAAGGGAPMADNNEGADGVGNASGNWHCDSTWLGDRVITTSTRTWALPTYNNHLYKQISSXSSGSTNDNHYFGYSTPWGYFDFNRFHCHFSPRDWQRLINNNWGFRPKRLNFKLFNIQVKEVTTNDGVTTIANNLTSTVQVFSDSEYQLPYVLGSAHQGCLPPFPADVFMIPQYGYLTLNNGSQAVGRSSFYCLEYFPSQMLRTGNNFTFSYTFEDVPFHSSYAHSQSLDRLMNPLIDQYLYYLXRTQSTGGTAGXRELLFSQGGPXNMSAQAKNWLPGPCYRQQRVSKTLXQNNNSNFAWTGATKYHLNGRDSLVNPGVAMATHKDDEXRFFPSSGVLIFGKXGAGANNTXLXNVMXTXEEEIKTTNPVATEQYGVVASNLQSSNTAPXTGXVNSQGALPGMVWQNRDVYLQGPIWAKIPHTDGNFHPSPLMGGFGLKHPPPQILIKNTPVPANPPXXFXPAKFASFITQYSTGQVSVEIEWELQKENSKRWNPEIQYTSNYAKSTNVDFAVNXEGVYXEPRPIGTRYLTRNL

SEQ ID NO: 1804 - protein, 737 aa, Artificial Sequence
  source: /note="Description of Artificial Sequence: Synthetic polypeptide"
  MOD_RES (264)..(264): Any naturally occurring amino acid
  MOD_RES (448)..(448): Any naturally occurring amino acid
  MOD_RES (470)..(470): Any naturally occurring amino acid
  MOD_RES (533)..(533): Any naturally occurring amino acid
  MOD_RES (547)..(547): Any naturally occurring amino acid
  MOD_RES (555)..(555): Any naturally occurring amino acid
  MOD_RES (557)..(557): Any naturally occurring amino acid
  MOD_RES (561)..(561): Any naturally occurring amino acid
  MOD_RES (563)..(563): Any naturally occurring amino acid
  MOD_RES (593)..(593): Any naturally occurring amino acid
  MOD_RES (596)..(596): Any naturally occurring amino acid
  MOD_RES (662)..(662): Any naturally occurring amino acid
  MOD_RES (664)..(664): Any naturally occurring amino acid
  MOD_RES (718)..(718): Any naturally occurring amino acid
MAADGYLPDWLEDNLSEGIREWWDLKPGAPKPKANQQKQDDGRGLVLPGYKYLGPFNGLDKGEPVNAADAAALEHDKAYDQQLKAGDNPYLRYNHADAEFQERLQEDTSFGGNLGRAVFQAKKRVLEPLGLVEEGAKTAPGKKRPVEPSPQRSPDSSTGIGKKGQQPAKKRLNFGQTGDSESVPDPQPLGEPPAGPSGLGSGTMAAGGGAPMADNNEGADGVGNASGNWHCDSTWLGDRVITTSTRTWALPTYNNHLYKQISSXSSGSTNDNHYFGYSTPWGYFDFNRFHCHFSPRDWQRLINNNWGFRPKRLNFKLFNIQVKEVTTNDGVTTIANNLTSTVQVFSDSEYQLPYVLGSAHQGCLPPFPADVFMIPQYGYLTLNNGSQAVGRSSFYCLEYFPSQMLRTGNNFTFSYTFEDVPFHSSYAHSQSLDRLMNPLIDQYLYYLXRTQSTGGTAGNRELLFSQGGPXNMSAQAKNWLPGPCYRQQRVSKTLSQNNNSNFAWTGATKYHLNGRDSLVNPGVAMATHKDDEXRFFPSSGVLIFGKXGAGANNTXLXNVMXTXEEEIKTTNPVATEQYGVVASNLQSSNTAPXTGXVNSQGALPGMVWQNRDVYLQGPIWAKIPHTDGNFHPSPLMGGFGLKHPPPQILIKNTPVPANPPAXFXPAKFASFITQYSTGQVSVEIEWELQKENSKRWNPEIQYTSNYAKSTNVDFAVNXEGVYSEPRPIGTRYLTRNL

SEQ ID NO: 1805 - DNA, 2217 bp, Artificial Sequence
  source: /note="Description of Artificial Sequence: Synthetic polynucleotide"
atggctgccgatggttatcttccagattggctcgaggacactctctctgaaggaataagacagtggtggaagctcaaacctggcccaccaccaccaaagcccgcagagcggcataaggacgacagcaggggtcttgtgcttcctgggtacaagtacctcggacccttcaacggactcgacaagggagagccggtcaacgaggcagacgccgcggccctcgagcacgacaaagcctacgaccggcagctcgacagcggagacaacccgtacctcaagtacaaccacgccgacgcggagtttcaggagcgccttaaagaagatacgtcttttgggggcaacctcggacgagcagtcttccaggcgaaaaagagggttcttgaacctctgggcctggttgaggaacctgttaagacggctccgggaaagaagagaccggtagagccatcaccccagcgttctccagactcctctacgggcatcggcaagaaaggccaacagcccgccagaaaaagactcaattttggtcagactggcgactcagagtcagttccagaccctcaacctctcggagaacctccagcagcgccctctggtgtgggacctaatacaatggctgcaggcggtggcgcaccaatggcagacaataacgaaggcgccgacggagtgggtagttcctcgggaaattggcattgcgattccacatggctgggcgacagagtcatcaccaccagcacccgaacctgggccctgcccacctacaacaaccacctctacaagcaaatctccaacgggacatcgggaggagccaccaacgacaacacctacttcggctacagcaccccctgggggtattttgactttaacagattccactgccacttttcaccacgtgactggcagcgactcatcaacaacaactggggattccggcccaagagactcagcttcaagctcttcaacatccaggtcaaggaggtcacgcagaatgaaggcaccaagaccatcgccaataacctcaccagcaccatccaggtgtttacggactcggagtaccagctgccgtacgttctcggctctgcccaccagggctgcctgcctccgttcccggcggacgtgttcatgattccccagtacggctacctaacactcaacaacggtagtcaggccgtgggacgctcctccttctactgcctggaatactttccttcgcagatgctgagaaccggcaacaacttccagtttacttacaccttcgaggacgtgcctttccacagcagctacgcccacagccagagcttggaccggctgatgaatcctctgattgaccagtacctgtactacttgtctcggactcaaacaacaggaggcacggcaaatacgcagactctgggcttcagccaaggtgggcctaatacaatggccaatcaggcaaagaactggctgccaggaccctgttaccgccaacaacgcgtctcaacgacaaccgggcaaaacaacaatagcaactttgcctggactgctgggaccaaataccatctgaatggaagaaattcattggctaatcctggcatcgctatggcaacacacaaagacgacgaggagcgtttttttcccagtaacgggatcctgatttttggcaaacaaaatgctgccagagacaatgcggattacagcgatgtcatgctcaccagcgaggaagaaatcaaaaccactaaccctgtggctacagaggaatacggtatcgtggcagataacttgcagcagcaaaacacggctcctcaaattggaactgtcaacagccagggggccttacccggtatggtctggcagaaccgggacgtgtacctgcagggtcccatctgggccaagattcctcacacggacggcaacttccacccgtctccgctgatgggcggctttggcctgaaacatcctccgcctcagatcctgatcaagaacacgcctgtacctgcggatcctccgaccaccttcaaccagtcaaagctgaactctttcatcacgcaatacagcaccggacaggtcagcgtggaaattgaatgggagctgcagaaggaaaacagcaagcgctggaaccccgagatccagtacacctccaactactacaaatctacaagtgtggactttgctgttaatacagaaggcgtgtactctgaaccccgccccattggcacccgttacctcacccgtaatctgtaa

SEQ ID NO: 1806 - protein, 733 aa, Artificial Sequence; identical to SEQ ID NO: 1591
  source: /note="Description of Artificial Sequence: Synthetic polypeptide"

SEQ ID NO: 1807 - DNA, 2203 bp, Artificial Sequence
  source: /note="Description of Artificial Sequence: Synthetic polynucleotide"
atgtcttttgttgatcaccctccagattggttggaagaagttggtgaaggtcttcgcgagtttttgggccttgaagcgggcccaccgaaaccaaaacccaatcagcagcatcaagatcaagcccgtggtcttgtgctgcctggttataactatctcggacccggaaacggtctcgatcgaggagagcctgtcaacagggcagacgaggtcgcgcgagagcacgacatctcgtacaacgagcagcttgaggcgggagacaacccctacctcaagtacaaccacgcggacgccgagtttcaggagaagctcgccgacgacacatccttcgggggaaacctcggaaaggcagtctttcaggccaagaaaagggttctcgaaccttttggcctggttgaagagggtgctaagacggcccctaccggaaagcggatagacgaccactttccaaaaagaaagaaggctcggaccgaagaggactccaagccttccacctcgtcagacgccgaagctggacccagcggatcccagcagctgcaaatcccagcccaaccagcctcaagtttgggagctgatacaatgtctgcgggaggtggcggcccattgggcgacaataaccaaggtgccgatggagtgggcaatgcctcgggagattggcattgcgattccacgtggatgggggacagagtcgtcaccaagtccacccgaacctgggtgctgcccagctacaacaaccaccagtaccgagagatcaaaagcggctccgtcgacggaagcaacgccaacgcctactttggatacagcaccccctgggggtactttgactttaaccgcttccacagccactggagcccccgagactggcaaagactcatcaacaactactggggcttcagaccccggtccctcagagtcaaaatcttcaacattcaagtcaaagaggtcacggtgcaggactccaccaccaccatcgccaacaacctcacctccaccgtccaagtgtttacggacgacgactaccagctgccctacgtcgtcggcaacgggaccgagggatgcctgccggccttccctccgcaggtctttacgctgccgcagtacggttacgcgacgctgaaccgcgacaacacagaaaatcccaccgagaggagcagcttcttctgcctagagtactttcccagcaagatgctgagaacgggcaacaactttgagtttacctacaactttgaggaggtgcccttccactccagcttcgctcccagtcagaacctgttcaagctggccaacccgctggtggaccagtacttgtaccgcttcgtgagcacaaataacactggcggagtccagttcaacaagaacctggccgggagatacgccaacacctacaaaaactggttcccggggcccatgggccgaacccagggctggaacctgggctccggggtcaaccgcgccagtgtcagcgccttcgccacgaccaataggatggagctcgagggcgcgagttaccaggtgcccccgcagccgaacggcatgaccaacaacctccagggcagcaacacctatgccctggagaacactatgatcttcaacagccagccggcgaacccgggcaccaccgccacgtacctcgagggcaacatgctcatcaccagcgagagcgagacgcagccggtgaaccgcgtggcgtacaacgtcggcgggcaggtggccaccaacaaccagagctccaccactgcccccgcgaccggcacgtacaacctccaggaaatcgtgcccggcagcgtgtggatggagagggacgtgtacctccaaggacccatctgggccaagatcccagagacgggggcgcactttcacccctctccggccatgggcggattcggactcaaacacccaccgcccatgatgctcatcaagaacacgcctgtgcccggaaatatcaccagcttctcggacgtgcccgtcagcagcttcatcacccagtacagcaccgggcaggtcaccgtggagatggagtgggagctcaagaaggaaaactccaagaggtggaacccagagatccagtacacaaacaactacaacgacccccagtttgtggactttgccccggacagcaccggggaatacagaaccaccagacctatcggaacccgataccttacccgacccctttaacccattcatgtcgcataccctcaataaa

SEQ ID NO: 1808 - protein, 724 aa, Artificial Sequence
  source: /note="Description of Artificial Sequence: Synthetic polypeptide"
MSFVDHPPDWLEEVGEGLREFLGLEAGPPKPKPNQQHQDQARGLVLPGYNYLGPGNGLDRGEPVNRADEVAREHDISYNEQLEAGDNPYLKYNHADAEFQEKLADDTSFGGNLGKAVFQAKKRVLEPFGLVEEGAKTAPTGKRIDDHFPKRKKARTEEDSKPSTSSDAEAGPSGSQQLQIPAQPASSLGADTMSAGGGGPLGDNNQGADGVGNASGDWHCDSTWMGDRVVTKSTRTWVLPSYNNHQYREIKSGSVDGSNANAYFGYSTPWGYFDFNRFHSHWSPRDWQRLINNYWGFRPRSLRVKIFNIQVKEVTVQDSTTTIANNLTSTVQVFTDDDYQLPYVVGNGTEGCLPAFPPQVFTLPQYGYATLNRDNTENPTERSSFFCLEYFPSKMLRTGNNFEFTYNFEEVPFHSSFAPSQNLFKLANPLVDQYLYRFVSTNNTGGVQFNKNLAGRYANTYKNWFPGPMGRTQGWNLGSGVNRASVSAFATTNRMELEGASYQVPPQPNGMTNNLQGSNTYALENTMIFNSQPANPGTTATYLEGNMLITSESETQPVNRVAYNVGGQVATNNQSSTTAPATGTYNLQEIVPGSVWMERDVYLQGPIWAKIPETGAHFHPSPAMGGFGLKHPPPMMLIKNTPVPGNITSFSDVPVSSFITQYSTGQVTVEMEWELKKENSKRWNPEIQYTNNYNDPQFVDFAPDSTGEYRTTRPIGTRYLTRPL

SEQ ID NO: 1809 - DNA, 2203 bp, Artificial Sequence
  source: /note="Description of Artificial Sequence: Synthetic polynucleotide"
atgtcttttgttgatcaccctccagattggttggaagaagttggtgaaggtcttcgcgagtttttgggccttgaagcgggcccaccgaaaccaaaacccaatcagcagcatcaagatcaagcccgtggtcttgtgctgcctggttataactatctcggacccggaaacggtctcgatcgaggagagcctgtcaacagggcagacgaggtcgcgcgagagcacgacatctcgtacaacgagcagcttgaggcgggagacaacccctacctcaagtacaaccacgcggacgccgagtttcaggagaagctcgccgacgacacatccttcgggggaaacctcggaaaggcagtctttcaggccaagaaaagggttctcgaaccttttggcctggttgaagagggtgctaagacggcccctaccggaaagcggatagacgaccactttccaaaaagaaagaaggctcggaccgaagaggactccaagccttccacctcgtcagacgccgaagctggacccagcggatcccagcagctgcaaatcccagcccaaccagcctcaagtttgggagctgatacaatgtctgcgggaggtggcggcccattgggcgacaataaccaaggtgccgatggagtgggcaatgcctcgggagattggcattgcgattccacgtggatgggggacagagtcgtcaccaagtccacccgaacctgggtgctgcccagctacaacaaccaccagtaccgagagatcaaaagcggctccgtcgacggaagcaacgccaacgcctactttggatacagcaccccctgggggtactttgactttaaccgcttccacagccactggagcccccgagactggcaaagactcatcaacaactactggggcttcagaccccggtccctcagagtcaaaatcttcaacattcaagtcaaagaggtcacggtgcaggactccaccaccaccatcgccaacaacctcacctccaccgtccaagtgtttacggacgacgactaccagctgccctacgtcgtcggcaacgggaccgagggatgcctgccggccttccctccgcaggtctttacgctgccgcagtacggttacgcgacgctgaaccgcgacaacacagaaaatcccaccgagaggagcagcttcttctgcctagagtactttcccagcaagatgctgagaacgggcaacaactttgagtttacctacaactttgaggaggtgcccttccactccagcttcgctcccagtcagaacctgttcaagctggccaacccgctggtggaccagtacttgtaccgcttcgtgagcacaaataacactggcggagtccagttcaacaagaacctggccgggagatacgccaacacctacaaaaactggttcccggggcccatgggccgaacccagggctggaacctgggctccggggtcaaccgcgccagtgtcagcgccttcgccacgaccaataggatggagctcgagggcgcgagttaccaggtgcccccgcagccgaacggcatgaccaacaacctccagggcagcaacacctatgccctggagaacactatgatcttcaacagccagccggcgaacccgggcaccaccgccacgtacctcgagggcaacatgctcatcaccagcgagagcgagacgcagccggtgaaccgcgtggcgtacaacgtcggcgggcagatggccaccaacaaccagagctccaccactgcccccgcgaccggcacggtcaacctccaggaaatcgtgcccggcagcgtgtggatggagagggacgtgtacctccaaggacccatctgggccaagatcccagagacgggggcgcactttcacccctctccggccatgggcggattcggactcaaacacccaccgcccatgatgctcatcaagaacacgcctgtgcccggaaatatcaccagcttctcggacgtgcccgtcagcagcttcatcacccagtacagcaccgggcaggtcaccgtggagatggagtgggagctcaagaaggaaaactccaagaggtggaacccagagatccagtacacaaacaactacaacgacccccagtttgtggactttgccccggacagcaccggggaatacagaaccaccagacctatcggaacccgataccttacccgacccctttaacccattcatgtcgcataccctcaataaa

SEQ ID NO: 1810 - protein, 724 aa, Artificial Sequence
  source: /note="Description of Artificial Sequence: Synthetic polypeptide"
MSFVDHPPDWLEEVGEGLREFLGLEAGPPKPKPNQQHQDQARGLVLPGYNYLGPGNGLDRGEPVNRADEVAREHDISYNEQLEAGDNPYLKYNHADAEFQEKLADDTSFGGNLGKAVFQAKKRVLEPFGLVEEGAKTAPTGKRIDDHFPKRKKARTEEDSKPSTSSDAEAGPSGSQQLQIPAQPASSLGADTMSAGGGGPLGDNNQGADGVGNASGDWHCDSTWMGDRVVTKSTRTWVLPSYNNHQYREIKSGSVDGSNANAYFGYSTPWGYFDFNRFHSHWSPRDWQRLINNYWGFRPRSLRVKIFNIQVKEVTVQDSTTTIANNLTSTVQVFTDDDYQLPYVVGNGTEGCLPAFPPQVFTLPQYGYATLNRDNTENPTERSSFFCLEYFPSKMLRTGNNFEFTYNFEEVPFHSSFAPSQNLFKLANPLVDQYLYRFVSTNNTGGVQFNKNLAGRYANTYKNWFPGPMGRTQGWNLGSGVNRASVSAFATTNRMELEGASYQVPPQPNGMTNNLQGSNTYALENTMIFNSQPANPGTTATYLEGNMLITSESETQPVNRVAYNVGGQMATNNQSSTTAPATGTVNLQEIVPGSVWMERDVYLQGPIWAKIPETGAHFHPSPAMGGFGLKHPPPMMLIKNTPVPGNITSFSDVPVSSFITQYSTGQVTVEMEWELKKENSKRWNPEIQYTNNYNDPQFVDFAPDSTGEYRTTRPIGTRYLTRPL

SEQ ID NO: 1811 - DNA, 2203 bp, Artificial Sequence
  source: /note="Description of Artificial Sequence: Synthetic polynucleotide"
atgtcttttgttgatcaccctccagattggttggaagaagttggtgaaggtcttcgcgagtttttgggccttgaagcgggcccaccgaaaccaaaacccaatcagcagcatcaagatcaagcccgtggtcttgtgctgcctggttataactatctcggacccggaaacggtctcgatcgaggagagcctgtcaacagggcagacgaggtcgcgcgagagcacgacatctcgtacaacgagcagcttgaggcgggagacaacccctacctcaagtacaaccacgcggacgccgagtttcaggagaagctcgccgacgacacatccttcgggggaaacctcggaaaggcagtctttcaggccaagaaaagggttctcgaaccttttggcctggttgaagagggtgctaagacggcccctaccggaaagcggatagacgaccactttccaaaaagaaagaaggctcggaccgaagaggactccaagccttccacctcgtcagacgccgaagctggacccagcggatcccagcagctgcaaatcccagcccaaccagcctcaagtttgggagctgatacaatgtctgcgggaggtggcggcccattgggcgacaataaccaaggtgccgatggagtgggcaatgcctcgggagattggcattgcgattccacgtggatgggggacagagtcgtcaccaagtccacccgaacctgggtgctgcccagctacaacaaccaccagtaccgagagatcaaaagcggctccgtcgacggaagcaacgccaacgcctactttggatacagcaccccctgggggtactttgactttaaccgcttccacagccactggagcccccgagactggcaaagactcatcaacaactactggggcttcagaccccggtccctcagagtcaaaatcttcaacattcaagtcaaagaggtcacggtgcaggactccaccaccaccatcgccaacaacctcacctccaccgtccaagtgtttacggacgacgactaccagctgccctacgtcgtcggcaacgggaccgagggatgcctgccggccttccctccgcaggtctttacgctgccgcagtacggttacgcgacgctgaaccgcgacaacacagaaaatcccaccgagaggagcagcttcttctgcctagagtactttcccagcaagatgctgagaacgggcaacaactttgagtttacctacaactttgaggaggtgcccttccactccagcttcgctcccagtcagaacctgttcaagctggccaacccgctggtggaccagtacttgtaccgcttcgtgagcacaaataacactggcggagtccagttcaacaagaacctggccgggagatacgccaacacctacaaaaactggttcccggggcccatgggccgaacccagggctggaacctgggctccggggtcaaccgcgccagtgtcagcgccttcgccacgaccaataggatggagctcgagggcgcgagttaccaggtgcccccgcagccgaacggcatgaccaacaacctccagggcagcaacacctatgccctggagaacactatgatcttcaacagccagccggcgaacccgggcaccaccgccacgtacctcgagggcaacatgctcatcaccagcgagagcgagacgcagccggtgaaccgcgtggcgtacaacgtcggcgggcagatggccaccaacaaccagagctccaccactgcccccgcgaccggcacgtacaacacccaggaaatcgtgcccggcagcgtgtggatggagagggacgtgtacctccaaggacccatctgggccaagatcccagagacgggggcgcactttcacccctctccggccatgggcggattcggactcaaacacccaccgcccatgatgctcatcaagaacacgcctgtgcccggaaatatcaccagcttctcggacgtgcccgtcagcagcttcatcacccagtacagcaccgggcaggtcaccgtggagatggagtgggagctcaagaaggaaaactccaagaggtggaacccagagatccagtacacaaacaactacaacgacccccagtttgtggactttgccccggacagcaccggggaatacagaaccaccagacctatcggaacccgataccttacccgacccctttaacccattcatgtcgcataccctcaataaa

SEQ ID NO: 1812 - protein, 724 aa, Artificial Sequence
  source: /note="Description of Artificial Sequence: Synthetic polypeptide"
MSFVDHPPDWLEEVGEGLREFLGLEAGPPKPKPNQQHQDQARGLVLPGYNYLGPGNGLDRGEPVNRADEVAREHDISYNEQLEAGDNPYLKYNHADAEFQEKLADDTSFGGNLGKAVFQAKKRVLEPFGLVEEGAKTAPTGKRIDDHFPKRKKARTEEDSKPSTSSDAEAGPSGSQQLQIPAQPASSLGADTMSAGGGGPLGDNNQGADGVGNASGDWHCDSTWMGDRVVTKSTRTWVLPSYNNHQYREIKSGSVDGSNANAYFGYSTPWGYFDFNRFHSHWSPRDWQRLINNYWGFRPRSLRVKIFNIQVKEVTVQDSTTTIANNLTSTVQVFTDDDYQLPYVVGNGTEGCLPAFPPQVFTLPQYGYATLNRDNTENPTERSSFFCLEYFPSKMLRTGNNFEFTYNFEEVPFHSSFAPSQNLFKLANPLVDQYLYRFVSTNNTGGVQFNKNLAGRYANTYKNWFPGPMGRTQGWNLGSGVNRASVSAFATTNRMELEGASYQVPPQPNGMTNNLQGSNTYALENTMIFNSQPANPGTTATYLEGNMLITSESETQPVNRVAYNVGGQMATNNQSSTTAPATGTYNTQEIVPGSVWMERDVYLQGPIWAKIPETGAHFHPSPAMGGFGLKHPPPMMLIKNTPVPGNITSFSDVPVSSFITQYSTGQVTVEMEWELKKENSKRWNPEIQYTNNYNDPQFVDFAPDSTGEYRTTRPIGTRYLTRPL

SEQ ID NO: 1813 - DNA, 2203 bp, Artificial Sequence
  source: /note="Description of Artificial Sequence: Synthetic polynucleotide"
atgtcttttgttgatcaccctccagattggttggaagaagttggtgaaggtcttcgcgagtttttgggccttgaagcgggcccaccgaaaccaaaacccaatcagcagcatcaagatcaagcccgtggtcttgtgctgcctggttataactatctcggacccggaaacggtctcgatcgaggagagcctgtcaacagggcagacgaggtcgcgcgagagcacgacatctcgtacaacgagcagcttgaggcgggagacaacccctacctcaagtacaaccacgcggacgccgagtttcaggagaagctcgccgacgacacatccttcgggggaaacctcggaaaggcagtctttcaggccaagaaaagggttctcgaaccttttggcctggttgaagagggtgctaagacggcccctaccggaaagcggatagacgaccactttccaaaaagaaagaaggctcggaccgaagaggactccaagccttccacctcgtcagacgccgaagctggacccagcggatcccagcagctgcaaatcccagcccaaccagcctcaagtttgggagctgatacaatgtctgcgggaggtggcggcccattgggcgacaataaccaaggtgccgatggagtgggcaatgcctcgggagattggcattgcgattccacgtggatgggggacagagtcgtcaccaagtccacccgaacctgggtgctgcccagctacaacaaccaccagtaccgagagatcaaaagcggctccgtcgacggaagcaacgccaacgcctactttggatacagcaccccctgggggtactttgactttaaccgcttccacagccactggagcccccgagactggcaaagactcatcaacaactactggggcttcagaccccggtccctcagagtcaaaatcttcaacattcaagtcaaagaggtcacggtgcaggactccaccaccaccatcgccaacaacctcacctccaccgtccaagtgtttacggacgacgactaccagctgccctacgtcgtcggcaacgggaccgagggatgcctgccggccttccctccgcaggtctttacgctgccgcagtacggttacgcgacgctgaaccgcgacaacacagaaaatcccaccgagaggagcagcttcttctgcctagagtactttcccagcaagatgctgagaacgggcaacaactttgagtttacctacaactttgaggaggtgcccttccactccagcttcgctcccagtcagaacctgttcaagctggccaacccgctggtggaccagtacttgtaccgcttcgtgagcacaaataacactggcggagtccagttcaacaagaacctggccgggagatacgccaacacctacaaaaactggttcccggggcccatgggccgaacccagggctggaacctgggctccggggtcaaccgcgccagtgtcagcgccttcgccacgaccaataggatggagctcgagggcgcgagttaccaggtgcccccgcagccgaacggcatgaccaacaacctccagggcagcaacacctatgccctggagaacactatgatcttcaacagccagccggcgaacccgggcaccaccgccacgtacctcgagggcaacatgctcatcaccagcgagagcgagacgcagccggtgaaccgcgtggcgtacaacgtcggcgggcagatggccaccaacaaccagagctccaccactgcccccgcgaccggcacggtcaacacccaggaaatcgtgcccggcagcgtgtggatggagagggacgtgtacctccaaggacccatctgggccaagatcccagagacgggggcgcactttcacccctctccggccatgggcggattcggactcaaacacccaccgcccatgatgctcatcaagaacacgcctgtgcccggaaatatcaccagcttctcggacgtgcccgtcagcagcttcatcacccagtacagcaccgggcaggtcaccgtggagatggagtgggagctcaagaaggaaaactccaagaggtggaacccagagatccagtacacaaacaactacaacgacccccagtttgtggactttgccccggacagcaccggggaatacagaaccaccagacctatcggaacccgataccttacccgacccctttaacccattcatgtcgcataccctcaataaa

SEQ ID NO: 1814 - protein, 724 aa, Artificial Sequence
  source: /note="Description of Artificial Sequence: Synthetic polypeptide"
MSFVDHPPDWLEEVGEGLREFLGLEAGPPKPKPNQQHQDQARGLVLPGYNYLGPGNGLDRGEPVNRADEVAREHDISYNEQLEAGDNPYLKYNHADAEFQEKLADDTSFGGNLGKAVFQAKKRVLEPFGLVEEGAKTAPTGKRIDDHFPKRKKARTEEDSKPSTSSDAEAGPSGSQQLQIPAQPASSLGADTMSAGGGGPLGDNNQGADGVGNASGDWHCDSTWMGDRVVTKSTRTWVLPSYNNHQYREIKSGSVDGSNANAYFGYSTPWGYFDFNRFHSHWSPRDWQRLINNYWGFRPRSLRVKIFNIQVKEVTVQDSTTTIANNLTSTVQVFTDDDYQLPYVVGNGTEGCLPAFPPQVFTLPQYGYATLNRDNTENPTERSSFFCLEYFPSKMLRTGNNFEFTYNFEEVPFHSSFAPSQNLFKLANPLVDQYLYRFVSTNNTGGVQFNKNLAGRYANTYKNWFPGPMGRTQGWNLGSGVNRASVSAFATTNRMELEGASYQVPPQPNGMTNNLQGSNTYALENTMIFNSQPANPGTTATYLEGNMLITSESETQPVNRVAYNVGGQMATNNQSSTTAPATGTVNTQEIVPGSVWMERDVYLQGPIWAKIPETGAHFHPSPAMGGFGLKHPPPMMLIKNTPVPGNITSFSDVPVSSFITQYSTGQVTVEMEWELKKENSKRWNPEIQYTNNYNDPQFVDFAPDSTGEYRTTRPIGTRYLTRPL

SEQ ID NO: 1815 - DNA, 2203 bp, Artificial Sequence
  source: /note="Description of Artificial Sequence: Synthetic polynucleotide"
atgtcttttgttgatcaccctccagattggttggaagaagttggtgaaggtcttcgcgagtttttgggccttgaagcgggcccaccgaaaccaaaacccaatcagcagcatcaagatcaagcccgtggtcttgtgctgcctggttataactatctcggacccggaaacggtctcgatcgaggagagcctgtcaacagggcagacgaggtcgcgcgagagcacgacatctcgtacaacgagcagcttgaggcgggagacaacccctacctcaagtacaaccacgcggacgccgagtttcaggagaagctcgccgacgacacatccttcgggggaaacctcggaaaggcagtctttcaggccaagaaaagggttctcgaaccttttggcctggttgaagagggtgctaagacggcccctaccggaaagcggatagacgaccactttccaaaaagaaagaaggctcggaccgaagaggactccaagccttccacctcgtcagacgccgaagctggacccagcggatcccagcagctgcaaatcccagcccaaccagcctcaagtttgggagctgatacaatgtctgcgggaggtggcggcccattgggcgacaataaccaaggtgccgatggagtgggcaatgcctcgggagattggcattgcgattccacgtggatgggggacagagtcgtcaccaagtccacccgaacctgggtgctgcccagctacaacaaccaccagtaccgagagatcaaaagcggctccgtcgacggaagcaacgccaacgcctactttggatacagcaccccctgggggtactttgactttaaccgcttccacagccactggagcccccgagactggcaaagactcatcaacaactactggggcttcagaccccggtccctcagagtcaaaatcttcaacattcaagtcaaagaggtcacggtgcaggactccaccaccaccatcgccaacaacctcacctccaccgtccaagtgtttacggacgacgactaccagctgccctacgtcgtcggcaacgggaccgagggatgcctgccggccttccctccgcaggtctttacgctgccgcagtacggttacgcgacgctgaaccgcgacaacacagaaaatcccaccgagaggagcagcttcttctgcctagagtactttcccagcaagatgctgagaacgggcaacaactttgagtttacctacaactttgaggaggtgcccttccactccagcttcgctcccagtcagaacctgttcaagctggccaacccgctggtggaccagtacttgtaccgcttcgtgagcacaaataacactggcggagtccagttcaacaagaacctggccgggagatacgccaacacctacaaaaactggttcccggggcccatgggccgaacccagggctggaacctgggctccggggtcaaccgcgccagtgtcagcgccttcgccacgaccaataggatggagctcgagggcgcgagttaccaggtgcccccgcagccgaacggcatgaccaacaacctccagggcagcaacacctatgccctggagaacactatgatcttcaacagccagccggcgaacccgggcaccaccgccacgtacctcgagggcaacatgctcatcaccagcgagagcgagacgcagccggtgaaccgcgtggcgtacaacgtcggcgggcagatggccaccaacaaccagagctccaccactgcccccgcgaccggcacgtacaacctccaggaaatcgtgcccggcagcgtgtggatggagagggacgtgtacctccaaggacccatctgggccaagatcccagagacgggggcgcactttcacccctctccggccatgggcggattcggactcaaacacccaccgcccatgatgctcatcaagaacacgcctgtgcccggaaatatcaccagcttctcggccgtgcccgtcagcagcttcatcacccagtacagcaccgggcaggtcaccgtggagatggagtgggagctcaagaaggaaaactccaagaggtggaacccagagatccagtacacaaacaactacaacgacccccagtttgtggactttgccccggacagcaccggggaatacagaaccaccagacctatcggaacccgataccttacccgacccctttaacccattcatgtcgcataccctcaataaa

SEQ ID NO: 1816 - protein, 724 aa, Artificial Sequence
  source: /note="Description of Artificial Sequence: Synthetic polypeptide"
MSFVDHPPDWLEEVGEGLREFLGLEAGPPKPKPNQQHQDQARGLVLPGYNYLGPGNGLDRGEPVNRADEVAREHDISYNEQLEAGDNPYLKYNHADAEFQEKLADDTSFGGNLGKAVFQAKKRVLEPFGLVEEGAKTAPTGKRIDDHFPKRKKARTEEDSKPSTSSDAEAGPSGSQQLQIPAQPASSLGADTMSAGGGGPLGDNNQGADGVGNASGDWHCDSTWMGDRVVTKSTRTWVLPSYNNHQYREIKSGSVDGSNANAYFGYSTPWGYFDFNRFHSHWSPRDWQRLINNYWGFRPRSLRVKIFNIQVKEVTVQDSTTTIANNLTSTVQVFTDDDYQLPYVVGNGTEGCLPAFPPQVFTLPQYGYATLNRDNTENPTERSSFFCLEYFPSKMLRTGNNFEFTYNFEEVPFHSSFAPSQNLFKLANPLVDQYLYRFVSTNNTGGVQFNKNLAGRYANTYKNWFPGPMGRTQGWNLGSGVNRASVSAFATTNRMELEGASYQVPPQPNGMTNNLQGSNTYALENTMIFNSQPANPGTTATYLEGNMLITSESETQPVNRVAYNVGGQMATNNQSSTTAPATGTYNLQEIVPGSVWMERDVYLQGPIWAKIPETGAHFHPSPAMGGFGLKHPPPMMLIKNTPVPGNITSFSAVPVSSFITQYSTGQVTVEMEWELKKENSKRWNPEIQYTNNYNDPQFVDFAPDSTGEYRTTRPIGTRYLTRPL

SEQ ID NO: 1817 - DNA, 2203 bp, Artificial Sequence
  source: /note="Description of Artificial Sequence: Synthetic polynucleotide"
atgtcttttgttgatcaccctccagattggttggaagaagttggtgaaggtcttcgcgagtttttgggccttgaagcgggcccaccgaaaccaaaacccaatcagcagcatcaagatcaagcccgtggtcttgtgctgcctggttataactatctcggacccggaaacggtctcgatcgaggagagcctgtcaacagggcagacgaggtcgcgcgagagcacgacatctcgtacaacgagcagcttgaggcgggagacaacccctacctcaagtacaaccacgcggacgccgagtttcaggagaagctcgccgacgacacatccttcgggggaaacctcggaaaggcagtctttcaggccaagaaaagggttctcgaaccttttggcctggttgaagagggtgctaagacggcccctaccggaaagcggatagacgaccactttccaaaaagaaagaaggctcggaccgaagaggactccaagccttccacctcgtcagacgccgaagctggacccagcggatcccagcagctgcaaatcccagcccaaccagcctcaagtttgggagctgatacaatgtctgcgggaggtggcggcccattgggcgacaataaccaaggtgccgatggagtgggcaatgcctcgggagattggcattgcgattccacgtggatgggggacagagtcgtcaccaagtccacccgaacctgggtgctgcccagctacaacaaccaccagtaccgagagatcaaaagcggctccgtcgacggaagcaacgccaacgcctactttggatacagcaccccctgggggtactttgactttaaccgcttccacagccactggagcccccgagactggcaaagactcatcaacaactactggggcttcagaccccggtccctcagagtcaaaatcttcaacattcaagtcaaagaggtcacggtgcaggactccaccaccaccatcgccaacaacctcacctccaccgtccaagtgtttatggacgacgactaccagctgccctacgtcgtcggcaacgggaccgagggatgcctgccggccttccctccgcaggtctttacgctgccgcagtacggttacgcgacgctgaaccgcgacaacacagaaaatcccaccgagaggagcagcttcttctgcctagagtactttcccagcaagatgctgagaacgggcaacaactttgagtttacctacaactttgaggaggtgcccttccactccagcttcgctcccagtcagaacctgttcaagctggccaacccgctggtggaccagtacttgtaccgcttcgtgagcacaaataacactggcggagtccagttcaacaagaacctggccgggagatacgccaacacctacaaaaactggttcccggggcccatgggccgaacccagggctggaacctgggctccggggtcaaccgcgccagtgtcagcgccttcgccacgaccaataggatggagctcgagggcgcgagttaccaggtgcccccgcagccgaacggcatgaccaacaacctccagggcagcaacacctatgccctggagaacactatgatcttcaacagccagccggcgaacccgggcaccaccgccacgtacctcgagggcaacatgctcatcaccagcgagagcgagacgcagccggtgaaccgcgtggcgtacaacgtcggcgggcagatggccaccaacaaccagagctccaccactgcccccgcgaccggcacgtacaacctccaggaaatcgtgcccggcagcgtgtggatggagagggacgtgtacctccaaggacccatctgggccaagatcccagagacgggggcgcactttcacccctctccggccatgggcggattcggactcaaacacccaccgcccatgatgctcatcaagaacacgcctgtgcccggaaatatcaccagcttctcggacgtgcccgtcagcagcttcatcacccagtacagcaccgggcaggtcaccgtggagatggagtgggagctcaagaaggaaaactccaagaggtggaacccagagatccagtacacaaacaactacaacgacccccagtttgtggactttgccccggacagcaccggggaatacagaaccaccagacctatcggaacccgataccttacccgacccctttaacccattcatgtcgcataccctcaataaa

SEQ ID NO: 1818 - protein, 724 aa, Artificial Sequence
  source: /note="Description of Artificial Sequence: Synthetic polypeptide"
MSFVDHPPDWLEEVGEGLREFLGLEAGPPKPKPNQQHQDQARGLVLPGYNYLGPGNGLDRGEPVNRADEVAREHDISYNEQLEAGDNPYLKYNHADAEFQEKLADDTSFGGNLGKAVFQAKKRVLEPFGLVEEGAKTAPTGKRIDDHFPKRKKARTEEDSKPSTSSDAEAGPSGSQQLQIPAQPASSLGADTMSAGGGGPLGDNNQGADGVGNASGDWHCDSTWMGDRVVTKSTRTWVLPSYNNHQYREIKSGSVDGSNANAYFGYSTPWGYFDFNRFHSHWSPRDWQRLINNYWGFRPRSLRVKIFNIQVKEVTVQDSTTTIANNLTSTVQVFMDDDYQLPYVVGNGTEGCLPAFPPQVFTLPQYGYATLNRDNTENPTERSSFFCLEYFPSKMLRTGNNFEFTYNFEEVPFHSSFAPSQNLFKLANPLVDQYLYRFVSTNNTGGVQFNKNLAGRYANTYKNWFPGPMGRTQGWNLGSGVNRASVSAFATTNRMELEGASYQVPPQPNGMTNNLQGSNTYALENTMIFNSQPANPGTTATYLEGNMLITSESETQPVNRVAYNVGGQMATNNQSSTTAPATGTYNLQEIVPGSVWMERDVYLQGPIWAKIPETGAHFHPSPAMGGFGLKHPPPMMLIKNTPVPGNITSFSDVPVSSFITQYSTGQVTVEMEWELKKENSKRWNPEIQYTNNYNDPQFVDFAPDSTGEYRTTRPIGTRYLTRPL

SEQ ID NO: 1819 - DNA, 2203 bp, Artificial Sequence
  source: /note="Description of Artificial Sequence: Synthetic polynucleotide"
atgtcttttgttgatcaccctccagattggttggaagaagttggtgaaggtcttcgcgagtttttgggccttgaagcgggcccaccgaaaccaaaacccaatcagcagcatcaagatcaagcccgtggtcttgtgctgcctggttataactatctcggacccggaaacggtctcgatcgaggagagcctgtcaacagggcagacgaggtcgcgcgagagcacgacatctcgtacaacgagcagcttgaggcgggagacaacccctacctcaagtacaaccacgcggacgccgagtttcaggagaagctcgccgacgacacatccttcgggggaaacctcggaaaggcagtctttcaggccaagaaaagggttctcgaaccttttggcctggttgaagagggtgctaagacggcccctaccggaaagcggatagacgaccactttccaaaaagaaagaaggctcggaccgaagaggactccaagccttccacctcgtcagacgccgaagctggacccagcggatcccagcagctgcaaatcccagcccaaccagcctcaagtttgggagctgatacaatgtctgcgggaggtggcggcccattgggcgacaataaccaaggtgccgatggagtgggcaatgcctcgggagattggcattgcgattccacgtggatgggggacagagtcgtcaccaagtccacccgaacctgggtgctgcccagctacaacaaccaccagtaccgagagatcaaaagcggctccgtcgacggaagcaacgccaacgcctactttggatacagcaccccctgggggtactttgactttaaccgcttccacagccactggagcccccgagactggcaaagactcatcaacaactactggggcttcagaccccggtccctcagagtcaaaatcttcaacattcaagtcaaagaggtcacggtgcaggactccaccaccaccatcgccaacaacctcacctccaccgtcgatgtgtttacggacgacgactaccagctgccctacgtcgtcggcaacgggaccgagggatgcctgccggccttccctccgcaggtctttacgctgccgcagtacggttacgcgacgctgaaccgcgacaacacagaaaatcccaccgagaggagcagcttcttctgcctagagtactttcccagcaagatgctgagaacgggcaacaactttgagtttacctacaactttgaggaggtgcccttccactccagcttcgctcccagtcagaacctgttcaagctggccaacccgctggtggaccagtacttgtaccgcttcgtgagcacaaataacactggcggagtccagttcaacaagaacctggccgggagatacgccaacacctacaaaaactggttcccggggcccatgggccgaacccagggctggaacctgggctccggggtcaaccgcgccagtgtcagcgccttcgccacgaccaataggatggagctcgagggcgcgagttaccaggtgcccccgcagccgaacggcatgaccaacaacctccagggcagcaacacctatgccctggagaacactatgatcttcaacagccagccggcgaacccgggcaccaccgccacgtacctcgagggcaacatgctcatcaccagcgagagcgagacgcagccggtgaaccgcgtggcgtacaacgtcggcgggcagatggccaccaacaaccagagctccaccactgcccccgcgaccggcacgtacaacctccaggaaatcgtgcccggcagcgtgtggatggagagggacgtgtacctccaaggacccatctgggccaagatcccagagacgggggcgcactttcacccctctccggccatgggcggattcggactcaaacacccaccgcccatgatgctcatcaagaacacgcctgtgcccggaaatatcaccagcttctcggacgtgcccgtcagcagcttcatcacccagtacagcaccgggcaggtcaccgtggagatggagtgggagctcaagaaggaaaactccaagaggtggaacccagagatccagtacacaaacaactacaacgacccccagtttgtggactttgccccggacagcaccggggaatacagaaccaccagacctatcggaacccgataccttacccgacccctttaacccattcatgtcgcataccctcaataaa

SEQ ID NO: 1820 - protein, 724 aa, Artificial Sequence
  source: /note="Description of Artificial Sequence: Synthetic polypeptide"
MSFVDHPPDWLEEVGEGLREFLGLEAGPPKPKPNQQHQDQARGLVLPGYNYLGPGNGLDRGEPVNRADEVAREHDISYNEQLEAGDNPYLKYNHADAEFQEKLADDTSFGGNLGKAVFQAKKRVLEPFGLVEEGAKTAPTGKRIDDHFPKRKKARTEEDSKPSTSSDAEAGPSGSQQLQIPAQPASSLGADTMSAGGGGPLGDNNQGADGVGNASGDWHCDSTWMGDRVVTKSTRTWVLPSYNNHQYREIKSGSVDGSNANAYFGYSTPWGYFDFNRFHSHWSPRDWQRLINNYWGFRPRSLRVKIFNIQVKEVTVQDSTTTIANNLTSTVDVFTDDDYQLPYVVGNGTEGCLPAFPPQVFTLPQYGYATLNRDNTENPTERSSFFCLEYFPSKMLRTGNNFEFTYNFEEVPFHSSFAPSQNLFKLANPLVDQYLYRFVSTNNTGGVQFNKNLAGRYANTYKNWFPGPMGRTQGWNLGSGVNRASVSAFATTNRMELEGASYQVPPQPNGMTNNLQGSNTYALENTMIFNSQPANPGTTATYLEGNMLITSESETQPVNRVAYNVGGQMATNNQSSTTAPATGTYNLQEIVPGSVWMERDVYLQGPIWAKIPETGAHFHPSPAMGGFGLKHPPPMMLIKNTPVPGNITSFSDVPVSSFITQYSTGQVTVEMEWELKKENSKRWNPEIQYTNNYNDPQFVDFAPDSTGEYRTTRPIGTRYLTRPL

SEQ ID NO: 1821 - DNA, 2203 bp, Artificial Sequence
  source: /note="Description of Artificial Sequence: Synthetic polynucleotide"
atgtcttttgttgatcaccctccagattggttggaagaagttggtgaaggtcttcgcgagtttttgggccttgaagcgggcccaccgaaaccaaaacccaatcagcagcatcaagatcaagcccgtggtcttgtgctgcctggttataactatctcggacccggaaacggtctcgatcgaggagagcctgtcaacagggcagacgaggtcgcgcgagagcacgacatctcgtacaacgagcagcttgaggcgggagacaacccctacctcaagtacaaccacgcggacgccgagtttcaggagaagctcgccgacgacacatccttcgggggaaacctcggaaaggcagtctttcaggccaagaaaagggttctcgaaccttttggcctggttgaagagggtgctaagacggcccctaccggaaagcggatagacgaccactttccaaaaagaaagaaggctcggaccgaagaggactccaagccttccacctcgtcagacgccgaagctggacccagcggatcccagcagctgcaaatcccagcccaaccagcctcaagtttgggagctgatacaatgtctgcgggaggtggcggcccattgggcgacaataaccaaggtgccgatggagtgggcaatgcctcgggagattggcattgcgattccacgtggatgggggacagagtcgtcaccaagtccacccgaacctgggtgctgcccagctacaacaaccaccagtaccgagagatcaaaagcggctccgtcgacggaagcaacgccaacgcctactttggatacagcaccccctgggggtactttgactttaaccgcttccacagccactggagcccccgagactggcaaagactcatcaacaactactggggcttcagaccccggtccctcagagtcaaaatcttcaacattcaagtcaaagaggtcacggtgcaggactccaccaccaccatcgccaacaacctcacctccaccgtccaagtgtttacggacgacgactaccagctgccctacgtcgtcggcaacgggacccagggatgcctgccggccttccctccgcaggtctttacgctgccgcagtacggttacgcgacgctgaaccgcgacaacacagaaaatcccaccgagaggagcagcttcttctgcctagagtactttcccagcaagatgctgagaacgggcaacaactttgagtttacctacaactttgaggaggtgcccttccactccagcttcgctcccagtcagaacctgttcaagctggccaacccgctggtggaccagtacttgtaccgcttcgtgagcacaaataacactggcggagtccagttcaacaagaacctggccgggagatacgccaacacctacaaaaactggttcccggggcccatgggccgaacccagggctggaacctgggctccggggtcaaccgcgccagtgtcagcgccttcgccacgaccaataggatggagctcgagggcgcgagttaccaggtgcccccgcagccgaacggcatgaccaacaacctccagggcagcaacacctatgccctggagaacactatgatcttcaacagccagccggcgaacccgggcaccaccgccacgtacctcgagggcaacatgctcatcaccagcgagagcgagacgcagccggtgaaccgcgtggcgtacaacgtcggcgggcagatggccaccaacaaccagagctccaccactgcccccgcgaccggcacgtacaacctccaggaaatcgtgcccggcagcgtgtggatggagagggacgtgtacctccaaggacccatctgggccaagatcccagagacgggggcgcactttcacccctctccggccatgggcggattcggactcaaacacccaccgcccatgatgctcatcaagaacacgcctgtgcccggaaatatcaccagcttctcggacgtgcccgtcagcagcttcatcacccagtacagcaccgggcaggtcaccgtggagatggagtgggagctcaagaaggaaaactccaagaggtggaacccagagatccagtacacaaacaactacaacgacccccagtttgtggactttgccccggacagcaccggggaatacagaaccaccagacctatcggaacccgataccttacccgacccctttaacccattcatgtcgcataccctcaataaa

SEQ ID NO: 1822 - protein, 724 aa, Artificial Sequence
  source: /note="Description of Artificial Sequence: Synthetic polypeptide"
MSFVDHPPDWLEEVGEGLREFLGLEAGPPKPKPNQQHQDQARGLVLPGYNYLGPGNGLDRGEPVNRADEVAREHDISYNEQLEAGDNPYLKYNHADAEFQEKLADDTSFGGNLGKAVFQAKKRVLEPFGLVEEGAKTAPTGKRIDDHFPKRKKARTEEDSKPSTSSDAEAGPSGSQQLQIPAQPASSLGADTMSAGGGGPLGDNNQGADGVGNASGDWHCDSTWMGDRVVTKSTRTWVLPSYNNHQYREIKSGSVDGSNANAYFGYSTPWGYFDFNRFHSHWSPRDWQRLINNYWGFRPRSLRVKIFNIQVKEVTVQDSTTTIANNLTSTVQVFTDDDYQLPYVVGNGTQGCLPAFPPQVFTLPQYGYATLNRDNTENPTERSSFFCLEYFPSKMLRTGNNFEFTYNFEEVPFHSSFAPSQNLFKLANPLVDQYLYRFVSTNNTGGVQFNKNLAGRYANTYKNWFPGPMGRTQGWNLGSGVNRASVSAFATTNRMELEGASYQVPPQPNGMTNNLQGSNTYALENTMIFNSQPANPGTTATYLEGNMLITSESETQPVNRVAYNVGGQMATNNQSSTTAPATGTYNLQEIVPGSVWMERDVYLQGPIWAKIPETGAHFHPSPAMGGFGLKHPPPMMLIKNTPVPGNITSFSDVPVSSFITQYSTGQVTVEMEWELKKENSKRWNPEIQYTNNYNDPQFVDFAPDSTGEYRTTRPIGTRYLTRPL

SEQ ID NO: 1823 - DNA, 2203 bp, Artificial Sequence
  source: /note="Description of Artificial Sequence: Synthetic polynucleotide"
atgtcttttgttgatcaccctccagattggttggaagaagttggtgaaggtcttcgcgagtttttgggccttgaagcgggcccaccgaaaccaaaacccaatcagcagcatcaagatcaagcccgtggtcttgtgctgcctggttataactatctcggacccggaaacggtctcgatcgaggagagcctgtcaacagggcagacgaggtcgcgcgagagcacgacatctcgtacaacgagcagcttgaggcgggagacaacccctacctcaagtacaaccacgcggacgccgagtttcaggagaagctcgccgacgacacatccttcgggggaaacctcggaaaggcagtctttcaggccaagaaaagggttctcgaaccttttggcctggttgaagagggtgctaagacggcccctaccggaaagcggatagacgaccactttccaaaaagaaagaaggctcggaccgaagaggactccaagccttccacctcgtcagacgccgaagctggacccagcggatcccagcagctgcaaatcccagcccaaccagcctcaagtttgggagctgatacaatgtctgcgggaggtggcggcccattgggcgacaataaccaaggtgccgatggagtgggcaatgcctcgggagattggcattgcgattccacgtggatgggggacagagtcgtcaccaagtccacccgaacctgggtgctgcccagctacaacaaccaccagtaccgagagatcaaaagcggctccgtcgacggaagcaacgccaacgcctactttggatacagcaccccctgggggtactttgactttaaccgcttccacagccactggagcccccgagactggcaaagactcatcaacaactactggggcttcagaccccggtccctcagagtcaaaatcttcaacattcaagtcaaagaggtcacggtgcaggactccaccaccaccatcgccaacaacctcacctccaccgtccaagtgtttacggacgacgactaccagctgccctacgtcgtcggcaacgggaccgagggatgcctgccggccttccctccgcaggtctttacgctgccgcagtacggttacgcgacgctgaaccgcgacaacacagaaaatcccaccgagaggagcagcttcttctgcctagagtactttcccagcaagatgctgagaacgggcaacaactttgagtttacctacaactttgaggaggtgcccttccactccagcttcgctcccagtcagaacctgttcaagctggccaacccgctggtggaccagtacttgtaccgcttcgtgagcacaaataacactggcggagtccagttcaacaagaacctggccgggagatacgccaacacctacaaaaactggttcccggggcccatgggccgaacccagggctggaacctgggctccggggtcaaccgcgccagtgtcagcgccttcgccacgaccaataggatggagctcgagggcgcgagttaccaggtgcccccgcagccgaacggcatgaccaacaacctccagggcagcaacacctatgccctggagaacactatgatcttcaacagccagtcggcgaacccgggcaccaccgccacgtacctcgagggcaacatgctcatcaccagcgagagcgagacgcagccggtgaaccgcgtggcgtacaacgtcggcgggcagatggccaccaacaaccagagctccaccactgcccccgcgaccggcacgtacaacctccaggaaatcgtgcccggcagcgtgtggatggagagggacgtgtacctccaaggacccatctgggccaagatcccagagacgggggcgcactttcacccctctccggccatgggcggattcggactcaaacacccaccgcccatgatgctcatcaagaacacgcctgtgcccggaaatatcaccagcttctcggacgtgcccgtcagcagcttcatcacccagtacagcaccgggcaggtcaccgtggagatggagtgggagctcaagaaggaaaactccaagaggtggaacccagagatccagtacacaaacaactacaacgacccccagtttgtggactttgccccggacagcaccggggaatacagaaccaccagacctatcggaacccgataccttacccgacccctttaacccattcatgtcgcataccctcaataaa

SEQ ID NO: 1824 - protein, 724 aa, Artificial Sequence
  source: /note="Description of Artificial Sequence: Synthetic polypeptide"
MSFVDHPPDWLEEVGEGLREFLGLEAGPPKPKPNQQHQDQARGLVLPGYNYLGPGNGLDRGEPVNRADEVAREHDISYNEQLEAGDNPYLKYNHADAEFQEKLADDTSFGGNLGKAVFQAKKRVLEPFGLVEEGAKTAPTGKRIDDHFPKRKKARTEEDSKPSTSSDAEAGPSGSQQLQIPAQPASSLGADTMSAGGGGPLGDNNQGADGVGNASGDWHCDSTWMGDRVVTKSTRTWVLPSYNNHQYREIKSGSVDGSNANAYFGYSTPWGYFDFNRFHSHWSPRDWQRLINNYWGFRPRSLRVKIFNIQVKEVTVQDSTTTIANNLTSTVQVFTDDDYQLPYVVGNGTEGCLPAFPPQVFTLPQYGYATLNRDNTENPTERSSFFCLEYFPSKMLRTGNNFEFTYNFEEVPFHSSFAPSQNLFKLANPLVDQYLYRFVSTNNTGGVQFNKNLAGRYANTYKNWFPGPMGRTQGWNLGSGVNRASVSAFATTNRMELEGASYQVPPQPNGMTNNLQGSNTYALENTMIFNSQSANPGTTATYLEGNMLITSESETQPVNRVAYNVGGQMATNNQSSTTAPATGTYNLQEIVPGSVWMERDVYLQGPIWAKIPETGAHFHPSPAMGGFGLKHPPPMMLIKNTPVPGNITSFSDVPVSSFITQYSTGQVTVEMEWELKKENSKRWNPEIQYTNNYNDPQFVDFAPDSTGEYRTTRPIGTRYLTRPL

SEQ ID NO: 1825 - DNA, 2203 bp, Artificial Sequence
  source: /note="Description of Artificial Sequence: Synthetic polynucleotide"
atgtcttttgttgatcaccctccagattggttggaagaagttggtgaaggtcttcgcgagtttttgggccttgaagcgggcccaccgaaaccaaaacccaatcagcagcatcaagatcaagcccgtggtcttgtgctgcctggttataactatctcggacccggaaacggtctcgatcgaggagagcctgtcaacagggcagacgaggtcgcgcgagagcacgacatctcgtacaacgagcagcttgaggcgggagacaacccctacctcaagtacaaccacgcggacgccgagtttcaggagaagctcgccgacgacacatccttcgggggaaacctcggaaaggcagtctttcaggccaagaaaagggttctcgaaccttttggcctggttgaagagggtgctaagacggcccctaccggaaagcggatagacgaccactttccaaaaagaaagaaggctcggaccgaagaggactccaagccttccacctcgtcagacgccgaagctggacccagcggatcccagcagctgcaaatcccagcccaaccagcctcaagtttgggagctgatacaatgtctgcgggaggtggcggcccattgggcgacaataaccaaggtgccgatggagtgggcaatgcctcgggagattggcattgcgattccacgtggatgggggacagagtcgtcaccaagtccacccgaacctgggtgctgcccagctacaacaaccaccagtaccgagagatcaaaagcggctccgtcgacggaagcaacgccaacgcctactttggatacagcaccccctgggggtactttgactttaaccgcttccacagccactggagcccccgagactggcaaagactcatcaacaactactggggcttcagaccccggtccctcagagtcaaaatcttcaacattcaagtcaaagaggtcacggtgcaggactccaccaccaccatcgccaacaacctcacctccaccgtccaagtgtttacggacgacgactaccagctgccctacgtcgtcggcaacgggaccgagggatgcctgccggccttccctccgcaggtctttacgctgccgcagtacggttacgcgacgctgaaccgcgacaacacagaaaatcccaccgagaggagcagcttcttctgcctagagtactttcccagcaagatgctgagaacgggcaacaactttgagtttacctacaactttgaggaggtgcccttccactccagcttcgctcccagtcagaacctgttcaagctggccaacccgctggtggaccagtacttgtaccgcttcgtgagcacaaataacactggcggagtccagttcaacaagaacctggccgggagatacgccaacacctacaaaaactggttcccggggcccatgggccgaacccagggctggaacctgggctccggggtcaaccgcgccagtgtcagcgccttcgccacgaccaataggatggagctcgagggcgcgagttaccaggtgcccccgcagccgaacggcatgaccaacaacctccagggcagcaacacctatgccctggagaacactatgatcttcaacagccagggggcgaacccgggcaccaccgccacgtacctcgagggcaacatgctcatcaccagcgagagcgagacgcagccggtgaaccgcgtggcgtacaacgtcggcgggcagatggccaccaacaaccagagctccaccactgcccccgcgaccggcacgtacaacctccaggaaatcgtgcccggcagcgtgtggatggagagggacgtgtacctccaaggacccatctgggccaagatcccagagacgggggcgcactttcacccctctccggccatgggcggattcggactcaaacacccaccgcccatgatgctcatcaagaacacgcctgtgcccggaaatatcaccagcttctcggacgtgcccgtcagcagcttcatcacccagtacagcaccgggcaggtcaccgtggagatggagtgggagctcaagaaggaaaactccaagaggtggaacccagagatccagtacacaaacaactacaacgacccccagtttgtggactttgccccggacagcaccggggaatacagaaccaccagacctatcggaacccgataccttacccgacccctttaacccattcatgtcgcataccctcaataaa

SEQ ID NO: 1826 - protein, 724 aa, Artificial Sequence
  source: /note="Description of Artificial Sequence: Synthetic polypeptide"
MSFVDHPPDWLEEVGEGLREFLGLEAGPPKPKPNQQHQDQARGLVLPGYNYLGPGNGLDRGEPVNRADEVAREHDISYNEQLEAGDNPYLKYNHADAEFQEKLADDTSFGGNLGKAVFQAKKRVLEPFGLVEEGAKTAPTGKRIDDHFPKRKKARTEEDSKPSTSSDAEAGPSGSQQLQIPAQPASSLGADTMSAGGGGPLGDNNQGADGVGNASGDWHCDSTWMGDRVVTKSTRTWVLPSYNNHQYREIKSGSVDGSNANAYFGYSTPWGYFDFNRFHSHWSPRDWQRLINNYWGFRPRSLRVKIFNIQVKEVTVQDSTTTIANNLTSTVQVFTDDDYQLPYVVGNGTEGCLPAFPPQVFTLPQYGYATLNRDNTENPTERSSFFCLEYFPSKMLRTGNNFEFTYNFEEVPFHSSFAPSQNLFKLANPLVDQYLYRFVSTNNTGGVQFNKNLAGRYANTYKNWFPGPMGRTQGWNLGSGVNRASVSAFATTNRMELEGASYQVPPQPNGMTNNLQGSNTYALENTMIFNSQGANPGTTATYLEGNMLITSESETQPVNRVAYNVGGQMATNNQSSTTAPATGTYNLQEIVPGSVWMERDVYLQGPIWAKIPETGAHFHPSPAMGGFGLKHPPPMMLIKNTPVPGNITSFSDVPVSSFITQYSTGQVTVEMEWELKKENSKRWNPEIQYTNNYNDPQFVDFAPDSTGEYRTTRPIGTRYLTRPL

SEQ ID NO: 1827 - DNA, 2194 bp, Artificial Sequence
  source: /note="Description of Artificial Sequence: Synthetic polynucleotide"
atgtcttttgttgatcaccctccagattggttggaagaagttggtgaaggtcttcgcgagtttttgggccttgaagcgggcccaccgaaaccaaaacccaatcagcagcatcaagatcaagcccgtggtcttgtgctgcctggttataactatctcggacccggaaacggtctcgatcgaggagagcctgtcaacagggcagacgaggtcgcgcgagagcacgacatctcgtacaacgagcagcttgaggcgggagacaacccctacctcaagtacaaccacgcggacgccgagtttcaggagaagctcgccgacgacacatccttcgggggaaacctcggaaaggcagtctttcaggccaagaaaagggttctcgaaccttttggcctggttgaagagggtgctaagacggcccctaccggaaagcggatagacgaccactttccaaaaagaaagaaggctcggaccgaagaggactccaagccttccacctcgtcagacgccgaagctggacccagcggatcccagcagctgcaaatcccagcccaaccagcctcaagtttgggagctgatacaatgtctgcgggaggtggcggcccattgggcgacaataaccaaggtgccgatggagtgggcaatgcctcgggagattggcattgcgattccacgtggatgggggacagagtcgtcaccaagtccacccgaacctgggtgctgcccagctacaacaaccaccagtaccgagagatcaaaagcggctccgtcgacggaagcaacgccaacgcctactttggatacagcaccccctgggggtactttgactttaaccgcttccacagccactggagcccccgagactggcaaagactcatcaacaactactggggcttcagaccccggtccctcagagtcaaaatcttcaacattcaagtcaaagaggtcacggtgcaggactccaccaccaccatcgccaacaacctcacctccaccgtccaagtgtttacggacgacgactaccagctgccctacgtcgtcggcaacgggaccgagggatgcctgccggccttccctccgcaggtctttacgctgccgcagtacggttacgcgacgctgaaccgcgacaacacagaaaatcccaccgagaggagcagcttcttctgcctagagtactttcccagcaagatgctgagaacgggcaacaactttgagtttacctacaactttgaggaggtgcccttccactccagcttcgctcccagtcagaacctgttcaagctggccaacccgctggtggaccagtacttgtaccgcttcgtgagcacaaataacactggcggagtccagttcaacaagaacctggccgggagatacgccaacacctacaaaaactggttcccggggcccatgggccgaacccagggctggaacctgggctccggggtcaaccgcgccagtgtcagcgccttcgccacgaccaataggatggagctcgagggcgcgagttaccaggtgcccccgcagccgaacggcatgaccaacaacctccagggcagcaacacctatgccctggagaacactatgatcttcgggaagcaaggctcagagaaaacaaatgtggacattgaaaaggtcatgatcaccagcgagagcgagacgcagccggtgaaccgcgtggcgtacaacgtcggcgggcagatggccaccaacaaccagagctccaccactgcccccgcgaccggcacgtacaacctccaggaaatcgtgcccggcagcgtgtggatggagagggacgtgtacctccaaggacccatctgggccaagatcccagagacgggggcgcactttcacccctctccggccatgggcggattcggactcaaacacccaccgcccatgatgctcatcaagaacacgcctgtgcccggaaatatcaccagcttctcggacgtgcccgtcagcagcttcatcacccagtacagcaccgggcaggtcaccgtggagatggagtgggagctcaagaaggaaaactccaagaggtggaacccagagatccagtacacaaacaactacaacgacccccagtttgtggactttgccccggacagcaccggggaatacagaaccaccagacctatcggaacccgataccttacccgacccctttaacccattcatgtcgcataccctcaataaa

SEQ ID NO: 1828 - protein, 721 aa, Artificial Sequence
  source: /note="Description of Artificial Sequence: Synthetic polypeptide"
MSFVDHPPDWLEEVGEGLREFLGLEAGPPKPKPNQQHQDQARGLVLPGYNYLGPGNGLDRGEPVNRADEVAREHDISYNEQLEAGDNPYLKYNHADAEFQEKLADDTSFGGNLGKAVFQAKKRVLEPFGLVEEGAKTAPTGKRIDDHFPKRKKARTEEDSKPSTSSDAEAGPSGSQQLQIPAQPASSLGADTMSAGGGGPLGDNNQGADGVGNASGDWHCDSTWMGDRVVTKSTRTWVLPSYNNHQYREIKSGSVDGSNANAYFGYSTPWGYFDFNRFHSHWSPRDWQRLINNYWGFRPRSLRVKIFNIQVKEVTVQDSTTTIANNLTSTVQVFTDDDYQLPYVVGNGTEGCLPAFPPQVFTLPQYGYATLNRDNTENPTERSSFFCLEYFPSKMLRTGNNFEFTYNFEEVPFHSSFAPSQNLFKLANPLVDQYLYRFVSTNNTGGVQFNKNLAGRYANTYKNWFPGPMGRTQGWNLGSGVNRASVSAFATTNRMELEGASYQVPPQPNGMTNNLQGSNTYALENTMIFGKQGSEKTNVDIEKVMITSESETQPVNRVAYNVGGQMATNNQSSTTAPATGTYNLQEIVPGSVWMERDVYLQGPIWAKIPETGAHFHPSPAMGGFGLKHPPPMMLIKNTPVPGNITSFSDVPVSSFITQYSTGQVTVEMEWELKKENSKRWNPEIQYTNNYNDPQFVDFAPDSTGEYRTTRPIGTRYLTRPL

SEQ ID NO: 1829 - protein, 519 aa, Artificial Sequence
  source: /note="Description of Artificial Sequence: Synthetic polypeptide"
DGVGSSSGNWHCDSTWLGDRVITTSTRTWALPTYNNHLYKQISNGTSGGATNDNTYFGYSTPWGYFDFNRFHCHFSPRDWQRLINNNWGFRPKRLSFKLFNIQVKEVTQNEGTKTIANNLTSTIQVFTDSEYQLPYVLGSAHQGCLPPFPADVFMIPQYGYLTLNNGSQAVGRSSFYCLEYFPSQMLRTGNNFQFTYTFEDVPFHSSYAHSQSLDRLMNPLIDQYLYYLSRTQTTGGTANTQTLGFSQGGPNTMANQAKNWLPGPCYRQQRVSTTTGQNNNSNFAWTAGTKYHLNGRNSLANPGIAMATHKDDEERFFPSNGILIFGKQNAARDNADYSDVMLTSEEEIKTTNPVATEEYGIVADNLQQQNTAPQIGTVNSQGALPGMVWQNRDVYLQGPIWAKIPHTDGNFHPSPLMGGFGLKHPPPQILIKNTPVPADPPTTFNQSKLNSFITQYSTGQVSVEIEWELQKENSKRWNPEIQYTSNYYKSTSVDFAVNTEGVYSEPRPIGTRYLTRNL

SEQ ID NO: 1830 - protein, 738 aa, Artificial Sequence
  source: /note="Description of Artificial Sequence: Synthetic polypeptide"
MAADGYLPDWLEDNLSEGIREWWALQPGAPKPKANQQHQDNARGLVLPGYKYLGPGNGLDKGEPVNAADAAALEHDKAYDQQLKAGDNPYLKYNHADAEFQERLKEDTSFGGNLGRAVFQAKKRLLEPLGLVEEAAKTAPGKKRPVEPSPQRSPDSSTGIGKKGQQPARKRLNFGQTGDSESVPDPQPLGEPPAAPSGVGPNTMAAGGGAPMADNNEGADGVGSSSGNWHCDSTWLGDRVITTSTRTWALPTYNNHLYKQISNGTSGGATNDNTYFGYSTPWGYFDFNRFHCHFSPRDWQRLINNNWGFRPKRLSFKLFNIQVKEVTQNEGTKTIANNLTSTIQVFTDSEYQLPYVLGSAHQGCLPPFPADVFMIPQYGYLTLNNGSQAVGRSSFYCLEYFPSQMLRTGNNFQFTYTFEDVPFHSSYAHSQSLDRLMNPLIDQYLYYLSRTQTTGGTANTQTLGFSQGGPNTMANQAKNWLPGPCYRQQRVSTTTGQNNNSNFAWTAGTKYHLNGRNSLANPGIAMATHKDDEERFFPSNGILIFGKQNAARDNADYSDVMLTSEEEIKTTNPVATEEYGIVADNLQQQNTAPQIGTVNSQGALPGMVWQNRDVYLQGPIWAKIPHTDGNFHPSPLMGGFGLKHPPPQILIKNTPVPADPPTTFNQSKLNSFITQYSTGQVSVEIEWELQKENSKRWNPEIQYTSNYYKSTSVDFAVNTEGVYSEPRPIGTRYLTRNL

SEQ ID NO: 1831 - protein, 725 aa, Artificial Sequence
  source: /note="Description of Artificial Sequence: Synthetic polypeptide"
MAADGYLPDWLEDNLSEGIREWWALQPGAPKPKANQQHQDNARGLVLPGYKYLGPGNGLDKGEPVNAADAAALEHDKAYDQQLKAGDNPYLKYNHADAEFQERLKEDTSFGGNLGRAVFQAKKRLLEPLGLVEEAAKTAPTGKRIDDHFPKRKKARTEEDSKPSTSSDAEAGPSGSQQLQIPAQPASSLGADTMSAGGGGPLGDNNQGADGVGNASGDWHCDSTWMGDRVVTKSTRTWVLPSYNNHQYREIKSGSVDGSNANAYFGYSTPWGYFDFNRFHSHWSPRDWQRLINNYWGFRPRSLRVKIFNIQVKEVTVQDSTTTIANNLTSTVQVFTDDDYQLPYVVGNGTEGCLPAFPPQVFTLPQYGYATLNRDNTENPTERSSFFCLEYFPSKMLRTGNNFEFTYNFEEVPFHSSFAPSQNLFKLANPLVDQYLYRFVSTNNTGGVQFNKNLAGRYANTYKNWFPGPMGRTQGWNLGSGVNRASVSAFATTNRMELEGASYQVPPQPNGMTNNLQGSNTYALENTMIFNSQPANPGTTATYLEGNMLITSESETQPVNRVAYNVGGQMATNNQSSTTAPATGTYNLQEIVPGSVWMERDVYLQGPIWAKIPETGAHFHPSPAMGGFGLKHPPPMMLIKNTPVPGNITSFSDVPVSSFITQYSTGQVTVEMEWELKKENSKRWNPEIQYTNNYNDPQFVDFAPDSTGEYRTTRPIGTRYLTRPL

SEQ ID NO: 1832 - protein, 736 aa, Artificial Sequence
  source: /note="Description of Artificial Sequence: Synthetic polypeptide"
MAADGYLPDWLEDNLSEGIREWWALKPGAPKPKANQQKQDDGRGLVLPGYKYLGPFNGLDKGEPVNAADAAALEHDKAYDQQLQAGDNPYLRYNHADAEFQERLQEDTSFGGNLGRAVFQAKKRVLEPLGLVEEGAKTAPGKKRPVDQSPQEPDSSSGVGKSGKQPARKRLNFGQTGDSESVPDPQPLGEPPAAPTSLGSNTMASGGGAPMADNNEGADGVGNSSGNWHCDSQWLGDRVITTSTRTWALPTYNNHLYKQISSQSGASNDNHYFGYSTPWGYFDFNRFHCHFSPRDWQRLINNNWGFRPKKLSFKLFNIQVKEVTQNDGTTTIANNLTSTVQVFTDSEYQLPYVLGSAHQGCLPPFPADVFMVPQYGYLTLNNGSQAVGRSSFYCLEYFPSQMLRTGNNFQFSYTFEDVPFHSSYAHSQSLDRLMNPLIDQYLYYLNRTQGTTSGTTNQSRLLFSQAGPQSMSLQARNWLPGPCYRQQRLSKTANDNNNSNFPWTAASKYHLNGRDSLVNPGPAMASHKDDEEKFFPMHGNLIFGKEGTTASNAELDNVMITDEEEIRTTNPVATEQYGTVANNLQSSNTAPTTRTVNDQGALPGMVWQDRDVYLQGPIWAKIPHTDGHFHPSPLMGGFGLKHPPPQIMIKNTPVPANPPTTFSPAKFASFITQYSTGQVSVEIEWELQKENSKRWNPEIQYTSNYNKSVNVDFTVDTNGVYSEPRPIGTRYLTRNL

SEQ ID NO: 1833 - protein, 735 aa, Artificial Sequence
  source: /note="Description of Artificial Sequence: Synthetic polypeptide"
MSFVDHPPDWLEEVGEGLREFLGLEAGPPKPKPNQQHQDQARGLVLPGYNYLGPGNGLDRGEPVNRADEVAREHDISYNEQLEAGDNPYLKYNHADAEFQEKLADDTSFGGNLGKAVFQAKKRVLEPFGLVEEGAKTAPGKKRPVDQSPQEPDSSSGVGKSGKQPARKRLNFGQTGDSESVPDPQPLGEPPAAPTSLGSNTMASGGGAPMADNNEGADGVGNSSGNWHCDSQWLGDRVITTSTRTWALPTYNNHLYKQISSQSGASNDNHYFGYSTPWGYFDFNRFHCHFSPRDWQRLINNNWGFRPKKLSFKLFNIQVKEVTQNDGTTTIANNLTSTVQVFTDSEYQLPYVLGSAHQGCLPPFPADVFMVPQYGYLTLNNGSQAVGRSSFYCLEYFPSQMLRTGNNFQFSYTFEDVPFHSSYAHSQSLDRLMNPLIDQYLYYLNRTQGTTSGTTNQSRLLFSQAGPQSMSLQARNWLPGPCYRQQRLSKTANDNNNSNFPWTAASKYHLNGRDSLVNPGPAMASHKDDEEKFFPMHGNLIFGKEGTTASNAELDNVMITDEEEIRTTNPVATEQYGTVANNLQSSNTAPTTRTVNDQGALPGMVWQDRDVYLQGPIWAKIPHTDGHFHPSPLMGGFGLKHPPPQIMIKNTPVPANPPTTFSPAKFASFITQYSTGQVSVEIEWELQKENSKRWNPEIQYTSNYNKSVNVDFTVDTNGVYSEPRPIGTRYLTRPL

SEQ ID NO: 1834 - protein, 736 aa, Artificial Sequence
  source: /note="Description of Artificial Sequence: Synthetic polypeptide"
MAADGYLPDWLEDNLSEGIREWWALKPGAPKPKANQQKQDDGRGLVLPGYKYLGPFNGLDKGEPVNAADAAALEHDKAYDQQLQAGDNPYLRYNHADAEFQERLQEDTSFGGNLGRAVFQAKKRVLEPLGLVEEGAKTAPGKKRPVEPSPQRSPDSSTGIGKKGQQPARKRLNFGQTGDSESVPDPQPLGEPPAAPSGVGPNTMAAGGGAPMADNNEGADGVGSSSGNWHCDSTWLGDRVITTSTRTWALPTYNNHLYKQISSQSGASNDNHYFGYSTPWGYFDFNRFHCHFSPRDWQRLINNNWGFRPKRLSFKLFNIQVKEVTQNEGTKTIANNLTSTIQVFTDSEYQLPYVLGSAHQGCLPPFPADVFMIPQYGYLTLNNGSQAVGRSSFYCLEYFPSQMLRTGNNFQFTYTFEDVPFHSSYAHSQSLDRLMNPLIDQYLYYLSRTQTTGGTANTQTLGFSQGGPNTMANQAKNWLPGPCYRQQRVSTTTGQNNNSNFAWTAGTKYHLNGRNSLANPGIAMATHKDDEERFFPSNGILIFGKQGTTASNAELDNVMITDEEEIKTTNPVATEEYGIVADNLQQQNTAPQIGTVNSQGALPGMVWQNRDVYLQGPIWAKIPHTDGNFHPSPLMGGFGLKHPPPQILIKNTPVPADPPTTFNQSKLNSFITQYSTGQVSVEIEWELQKENSKRWNPEIQYTSNYNKSVNVDFTVDTNGVYSEPRPIGTRYLTRNL

SEQ ID NO: 1835 - protein, 736 aa, Artificial Sequence
  source: /note="Description of Artificial Sequence: Synthetic polypeptide"
MAADGYLPDWLEDNLSEGIREWWALKPGAPKPKANQQKQDDGRGLVLPGYKYLGPFNGLDKGEPVNAADAAALEHDKAYDQQLQAGDNPYLRYNHADAEFQERLQEDTSFGGNLGRAVFQAKKRVLEPLGLVEEGAKTAPGKKRPVEPSPQRSPDSSTGIGKKGQQPARKRLNFGQTGDSESVPDPQPLGEPPAAPSGVGPNTMAAGGGAPMADNNEGADGVGSSSGNWHCDSTWLGDRVITTSTRTWALPTYNNHLYKQISSQSGASNDNHYFGYSTPWGYFDFNRFHCHFSPRDWQRLINNNWGFRPKRLSFKLFNIQVKEVTQNEGTKTIANNLTSTIQVFTDSEYQLPYVLGSAHQGCLPPFPADVFMIPQYGYLTLNNGSQAVGRSSFYCLEYFPSQMLRTGNNFQFTYTFEDVPFHSSYAHSQSLDRLMNPLIDQYLYYLSRTQTTGGTANTQTLGFSQGGPNTMANQAKNWLPGPCYRQQRVSTTTGQNNNSNFAWTAGTKYHLNGRNSLANPGIAMATHKDDEERFFPSNGILIFGKQNAARDNADYSDVMLTSEEEIKTTNPVATEEYGIVADNLQQQNTAPQIGTVNSQGALPGMVWQNRDVYLQGPIWAKIPHTDGNFHPSPLMGGFGLKHPPPQILIKNTPVPADPPTTFNQSKLNSFITQYSTGQVSVEIEWELQKENSKRWNPEIQYTSNYYKSTSVDFAVNTEGVYSEPRPIGTRYLTRNL

SEQ ID NO: 1836 - protein, 736 aa, Artificial Sequence
  source: /note="Description of Artificial Sequence: Synthetic polypeptide"
MAADGYLPDWLEDNLSEGIREWWDLKPGAPKPKANQQKQDDGRGLVLPGYKYLGPFNGLDKGEPVNAADAAALEHDKAYDQQLKAGDNPYLRYNHADAEFQERLQEDTSFGGNLGRAVFQAKKRVLEPLGLVEEGAKTAPGKKRPVEQSPQEPDSSSGIGKTGQQPAKKRLNFGQTGDTESVPDPQPLGEPPAAPSGLGPNTMASGGGAPMADNNEGADGVGNSSGNWHCDSTWLGDRVITTSTRTWALPTYNNHLYKQISNGTSGGSTNDNTYFGYSTPWGYFDFNRFHCHFSPRDWQRLINNNWGFRPKRLNFKLFNIQVKEVTTNEGTKTIANNLTSTVQVFTDSEYQLPYVLGSAHQGCLPPFPADVFMVPQYGYLTLNNGSQALGRSSFYCLEYFPSQMLRTGNNFQFSYTFEDVPFHSSYAHSQSLDRLMNPLIDQYLYYLVRTQTTGTGGTQTLAFSQAGPSSMASQARNWVPGPSYRQQRVSTTTNQNNNSNFAWTGAAKFKLNGRDSLMNPGVAMASHKDDEDRFFPSSGVLIFGKQGAGNDGVDYSQVLITDEEEIKATNPVATEEYGAVAINNQAANTQAQTGLVHNQGVIPGMVWQNRDVYLQGPIWAKIPHTDGNFHPSPLMGGFGLKHPPPQILIKNTPVPADPPLTFNQAKLNSFITQYSTGQVSVEIEWELQKENSKRWNPEIQYTSNYYKSTNVDFAVNTEGVYSEPRPIGTRYLTRNL

SEQ ID NO: 1837 - DNA, 3695 bp, Artificial Sequence
  source: /note="Description of Artificial Sequence: Synthetic polynucleotide"
ctctttgcgcttgcgttttcccttgtccagatagcccagtagctgacattcatccggggtcagcaccgtttctgcggactggctttctacgtgaaaaggatctaggtgaagatcctttttgataatctcatgcctgacatttatattccccagaacatcaggttaatggcgtttttgatgtcattttcgcggtggctgagatcagccacttcttccccgataacggagaccggcacactggccatatcggtggtcatcatgcgccagctttcatccccgatatgcaccaccgggtaaagttcacgggagactttatctgacagcagacgtgcactggccagggggatcaccatccgtcgccccggcgtgtcaataatatcactctgtacatccacaaacagacgataacggctctctcttttataggtgtaaaccttaaactgccgtacgtataggctgcgcaactgttgggaagggcgatcggtgcgggcctcttcgctattacgccagctggcgaaagggggatgtgctgcaaggcgattaagttgggtaacgccagggttttcccagtcacgacgttgtaaaacgacggccagtgaattgtaatacgactcactatagggcgaattgaatttagcggccgcgaattcgcccttatgatatctggtgggaggagggcaagatgacggccaaggtcgtggagtccgccaaggccattctcggcggcagcaaagtgcgcgtggaccaaaagtgcaagtcgtccgcccagatcgatcccactcccgtcattgtcacctccaacaccaacatgtgcgccgtgattgacgggaacagcaccaccttcgagcaccagcagccgttgcaggaccggatgttcaaatttgaacttacccgccgtctggagcatgactttggcaaggtgacaaagcaggaagtcaaagagttcttccgctgggcgcaggatcacgtgaccgaggtggcgcatgagttccacgtcagaaagggtggagccaacaagagacccgcccccgatgacgctgataaaagcgagcccaagcgggcctgcccctcagtcgcagatccatcgacgtcagacgcggaaggagctccggtggactttgccgacaggtaccaaaacaaatgttctcgtcacgcgggcatgcttcagatgctgtttccctgcaagacatgcgagagaatgaatcagaatttcaacatttgcttcacgcacgggaccagggactgttcggagtgcttccccggcgtgtcagaatctcaaccggtcgtcagaaaaaggacgtatcggaaactctgtgccattcatcatctgctggggagggctcccgagattgcttgctcggcctgcgatctggtcaacgtggacctggatgactgtgtctctgagcaataaatgacttaaaccaggtatggctgccgatggttatcttccagattggctcgaggacaacctctctgagggcattcgcgagtggtgggacttgaaacctggagccccgaaacccaaagccaaccagcaaaagcaggacgacggccggggtctggtgcttcctggctacaagtacctcggacccttcaacggactcgacaagggggagcccgtcaacgcggcggacgcagcggccctcgagcacgacaaggcctacgaccagcagctcaaagcgggtgacaatccgtacctgcggtataaccacgccgacgccgagtttcaggagcgtctgcaagaagatacgtcttttgggggcaacctcgggcgagcagtcttccaggccaagaagcgggttctcgaacctctcggtctggttgaggaaggcgctaagacggctcctggaaagaagagaccggtagagcagtcaccccaagaaccagactcctcatcgggcatcggcaagacaggccagcagcccgctaaaaagagactcaattttggtcagactggcgacacagagtcagtccccgacccacaacctctcggagaacctccagcagccccctcaggtctgggacctaatacaatggcttcaggcggtggcgctccaatggcagacaataacgaaggcgccgacggagtgggtaattcctcgggaaattggcattgcgattccacatggctgggggacagagtcatcaccaccagcacccgaacctgggccctgcccacctacaacaaccacctctacaagcaaatctccaacggcacctcgggaggaagcaccaacgacaacacctactttggctacagcaccccctgggggtattttgacttcaacagattccactgccacttttcaccacgtgactggcagcgactcatcaacaacaattggggattccggcccaagagactcaacttcaagctcttcaacatccaggtcaaggaagtcacgacgaacgaaggcaccaagaccatcgccaataatctcaccagcaccgtgcaggtctttacggactcggagtaccagctaccgtacgtgctaggatcagctcaccagggatgtctgcctccgttcccggcggacgtcttcatggttcctcagtacggttatctaactctgaacaatggcagccaggccctgggacgttcctccttctactgcctggagtatttcccatcgcagatgctgagaaccggcaacaactttcagttcagctacaccttcgaggacgtgcctttccacagcagctacgcgcacagccaaagcctggacaggctgatgaatcccctcatcgaccagtacctgtattacctggtcagaacgcagacaaccgggactggagggacgcagactctggcattcagccaagcaggccctagctcaatggccagccaggctagaaactgggtgcccggaccgagctaccggcagcagcgcgtctccacgacaaccaaccagaacaacaacagcaactttgcctggacgggagctgccaaatttaaactgaacggccgagactctctaatgaaccccggcgtggccatggcttcacacaaggatgacgaggaccgcttcttcccttctagcggggtcctgattttcggcaagcaaggagccgggaatgatggagtggattacagccaagtgctgattacagatgaggaagaaatcaaggctaccaaccccgtggcaacagaggaatatggagcagtggccatcaacaaccaggccgctaatacgcaggcgcagaccggactcgtgcacaaccagggggtgattcccggcatggtgtggcagaacagagacgtgtacctgcagggtcccatctgggccaaaattcctcacacggacggcaactttcacccgtctcccctgatgggcggctttggactgaagcacccgcctcctcaaattctcatcaagaacacaccggttccagcggacccgccgcttaccttcaaccaggccaagctgaactctttcatcacgcagtacagcaccggacaggtcagcgtggaaatcgagtgggagctgcagaaagaaaacagcaaacgctggaatccagagattcagtacacttccaactactacaaatctacaaatgtggactttgctgtcaacacggaaggagtgtatagcgagcctcgccccattggcacccgttacctcacccgcaacctgtaattgcctgttaatcaataaaccggttaattcgtttcagtaaggaagaattcgtttaaa

SEQ ID NO: 1838 - protein, 736 aa, Artificial Sequence; identical to SEQ ID NO: 507
  source: /note="Description of Artificial Sequence: Synthetic polypeptide"

SEQ ID NO: 1839 - protein, 736 aa, Artificial Sequence
  source: /note="Description of Artificial Sequence: Synthetic polypeptide"
MAADGYLPDWLEDNLSEGIREWWDLKPGAPKPKANQQKQDDGRGLVLPGYKYLGPFNGLDKGEPVNAADAAALEHDKAYDQQLKAGDNPYLRYNHADAEFQERLQEDTSFGGNLGRAVFQAKKRVLEPLGLVEEGAKTAPGKKRPVEQSPQEPDSSSGIGKTGQQPAKKRLNFGQTGDTESVPDPQPLGEPPAAPSGLGPNTMASGGGAPMADNNEGADGVGNSSGNWHCDSTWLGDRVITTSTRTWALPTYNNHLYKQISNGTSGGSTNDNTYFGYSTPWGYFDFNRFHCHFSPRDWQRLINNNWGFRPKRLNFKLFNIQVKEVTTNEGTKTIANNLTSTVQVFTDSEYQLPYVLGSAHQGCLPPFPADVFMVPQYGYLTLNNGSQALGRSSFYCLEYFPSQMLRTGNNFQFSYTFEDVPFHSSYAHSQSLDRLMNPLIDQYLYYLVRTQTTGTGGTQTLAFSQAGPSNMASQARNWVPGPSYRQQRVSTTTNQNNNSNFAWTGAAKFKLNGRDSLMNPGVAMASHKDDEDRFFPSSGVLIFGKQGAGNDGVDYSQVLITDEEEIKATNPVATEEYGAVAINNQAANTQAQTGLVHNQGVIPGMVWQNRDVYLQGPIWAKIPHTDGNFHPSPLMGGFGLKHPPPQILIKNTPVPADPPLTFNQAKLNSFITQYSTGQVSVEIEWELQKENSKRWNPEIQYTSNYYKSTNVDFAVNTEGVYSEPRPIGTRYLTRNL

SEQ ID NO: 1840 - protein, 738 aa, Artificial Sequence; identical to SEQ ID NO: 1534
  source: /note="Description of Artificial Sequence: Synthetic polypeptide"

SEQ ID NO: 1841 - protein, 736 aa, Artificial Sequence
  source: /note="Description of Artificial Sequence: Synthetic polypeptide"
MAADGYLPDWLEDNLSEGIREWWALQPGAPKPKANQQHQDNARGLVLPGYKYLGPGNGLDKGEPVNAADAAALEHDKAYDQQLKAGDNPYLKYNHADAEFQERLKEDTSFGGNLGRAVFQAKKRILEPLGLVEEAAKTAPGKKRPVDQSPQEPDSSSGVGKSGKQPARKRLNFGQTGDSESVPDPQPLGEPPAAPTSLGSNTMASGGGAPMADNNEGADGVGNSSGNWHCDSQWLGDRVITTSTRTWALPTYNNHLYKQISSQSGASNDNHYFGYSTPWGYFDFNRFHCHFSPRDWQRLINNNWGFRPKKLSFKLFNIQVKEVTQNDGTTTIANNLTSTVQVFTDSEYQLPYVLGSAHQGCLPPFPADVFMVPQYGYLTLNNGSQAVGRSSFYCLEYFPSQMLRTGNNFQFSYTFEDVPFHSSYAHSQSLDRLMNPLIDQYLYYLNRTQGTTSGTTNQSRLLFSQAGPQSMSLQARNWLPGPCYRQQRLSKTANDNNNSNFPWTAASKYHLNGRDSLVNPGPAMASHKDDEEKFFPMHGNLIFGKEGTTASNAELDNVMITDEEEIRTTNPVATEQYGTVANNLQSSNTAPTTRTVNDQGALPGMVWQDRDVYLQGPIWAKIPHTDGHFHPSPLMGGFGLKHPPPQIMIKNTPVPANPPTTFSPAKFASFITQYSTGQVSVEIEWELQKENSKRWNPEIQYTSNYNKSVNVDFTVDTNGVYSEPRPIGTRYLTRPL

SEQ ID NO: 1842 - protein, 736 aa, Artificial Sequence
  source: /note="Description of Artificial Sequence: Synthetic polypeptide"
MAADGYLPDWLEDNLSEGIREWWALQPGAPKPKANQQHQDNARGLVLPGYKYLGPGNGLDKGEPVNAADAAALEHDKAYDQQLKAGDNPYLKYNHADAEFQERLKEDTSFGGNLGRAVFQAKKRLLEPLGLVEEAAKTAPGKKRPVDQSPQEPDSSSGVGKSGKQPARKRLNFGQTGDSESVPDPQPLGEPPAAPTSLGSNTMASGGGAPMADNNEGADGVGNSSGNWHCDSQWLGDRVITTSTRTWALPTYNNHLYKQISSQSGASNDNHYFGYSTPWGYFDFNRFHCHFSPRDWQRLINNNWGFRPKKLSFKLFNIQVKEVTQNDGTTTIANNLTSTVQVFTDSEYQLPYVLGSAHQGCLPPFPADVFMVPQYGYLTLNNGSQAVGRSSFYCLEYFPSQMLRTGNNFQFSYTFEDVPFHSSYAHSQSLDRLMNPLIDQYLYYLNRTQGTTSGTTNQSRLLFSQAGPQSMSLQARNWLPGPCYRQQRLSKVANDNNNSNFPWTAASKYHLNGRDSLVNPGPAMASHKDDEEKFFPMHGNLIFGKEGTTASNAELDNVMITDEEEIRTTNPVATEQYGTVANNLQSSNTAPTTRTVNDQGALPGMVWQDRDVYLQGPIWAKIPHTDGHFHPSPLMGGFGLKHPPPQIMIKNTPVPANPPTTFVPAKFASFITQYSTGQVSVEIEWELQKENSKRWNPEIQYTSNYNKSVNVDFTVDTNGVYSEPRPIGTRYLTRPL

SEQ ID NO: 1843 - protein, 736 aa, Artificial Sequence
  source: /note="Description of Artificial Sequence: Synthetic polypeptide"
  MOD_RES (168)..(168): Any naturally occurring amino acid
  MOD_RES (204)..(204): Any naturally occurring amino acid
  MOD_RES (266)..(266): Any naturally occurring amino acid
  MOD_RES (311)..(311): Any naturally occurring amino acid
  MOD_RES (411)..(411): Any naturally occurring amino acid
  MOD_RES (460)..(460): Any naturally occurring amino acid
  MOD_RES (493)..(493): Any naturally occurring amino acid
  MOD_RES (562)..(562): Any naturally occurring amino acid
  MOD_RES (576)..(576): Any naturally occurring amino acid
  MOD_RES (587)..(587): Any naturally occurring amino acid
  MOD_RES (609)..(609): Any naturally occurring amino acid
MAADGYLPDWLEDNLSEGIREWWDLKPGAPKPKANQQKQDDGRGLVLPGYKYLGPFNGLDKGEPVNAADAAALEHDKAYDQQLKAGDNPYLRYNHADAEFQERLQEDTSFGGNLGRAVFQAKKRVLEPLGLVEEGAKTAPGKKRPVEQSPQEPDSSSGIGKKGQQPAXKRLNFGQTGDSESVPDPQPLGEPPAAPSGVGSNTMXAGGGAPMADNNEGADGVGNASGNWHCDSTWLGDRVITTSTRTWALPTYNNHLYKQISSQSGXSTNDNTYFGYSTPWGYFDFNRFHCHFSPRDWQRLINNNWGFRPKXLNFKLFNIQVKEVTTNDGTTTIANNLTSTVQVFTDSEYQLPYVLGSAHQGCLPPFPADVFMIPQYGYLTLNNGSQAVGRSSFYCLEYFPSQMLRTGNNFXFSYTFEDVPFHSSYAHSQSLDRLMNPLIDQYLYYLSRTQTTSGTAGNRXLQFSQAGPSSMANQAKNWLPGPCYRQQRVSKTXNQNNNSNFAWTGATKYHLNGRDSLVNPGPAMATHKDDEDKFFPMSGVLIFGKQGAGNSNVDLDNVMITXEEEIKTTNPVATEXYGTVATNLQSXNTAPATGTVNSQGALPGMVWQXRDVYLQGPIWAKIPHTDGHFHPSPLMGGFGLKHPPPQILIKNTPVPANPPTTFSPAKFASFITQYSTGQVSVEIEWELQKENSKRWNPEIQYTSNYNKSTNVDFAVDTNGVYSEPRPIGTRYLTRNL

SEQ ID NO: 1844 - DNA, 2208 bp, Artificial Sequence
  source: /note="Description of Artificial Sequence: Synthetic polynucleotide"
  modified_base (502)..(504): a, c, t, or g
  modified_base (610)..(612): a, c, t, or g
  modified_base (796)..(798): a, c, t, or g
  modified_base (931)..(933): a, c, t, or g
  modified_base (1231)..(1233): a, c, t, or g
  modified_base (1378)..(1380): a, c, t, or g
  modified_base (1477)..(1479): a, c, t, or g
  modified_base (1684)..(1686): a, c, t, or g
  modified_base (1726)..(1728): a, c, t, or g
  modified_base (1759)..(1761): a, c, t, or g
  modified_base (1825)..(1827): a, c, t, or g
atggctgccgatggttatcttccagattggctcgaggacaacctctctgagggcattcgcgagtggtgggacttgaaacctggagccccgaaacccaaagccaaccagcaaaagcaggacgacggccggggtctggtgcttcctggctacaagtacctcggacccttcaacggactcgacaagggggagcccgtcaacgcggcggacgcagcggccctcgagcacgacaaggcctacgaccagcagctcaaagcgggtgacaatccgtacctgcggtataaccacgccgacgccgagtttcaggagcgtctgcaagaagatacgtcttttgggggcaacctcgggcgagcagtcttccaggccaagaagcgggttctcgaacctctcggtctggttgaggaaggcgctaagacggctcctggaaagaagagaccggtagagcaatcaccccaggaaccagactcctcttcgggcatcggcaagaaaggccagcagcccgcgnnnaagagactcaactttgggcagacaggcgactcagagtcagtgcccgaccctcaaccactcggagaaccccccgcagccccctctggtgtgggatctaatacaatgnnngcaggcggtggcgctccaatggcagacaataacgaaggcgccgacggagtgggtaacgcctcaggaaattggcattgcgattccacatggctgggcgacagagtcatcaccaccagcacccgaacctgggccctccccacctacaacaaccacctctacaagcaaatctccagccaatcgggannnagcaccaacgacaacacctacttcggctacagcaccccctgggggtattttgactttaacagattccactgccacttctcaccacgtgactggcagcgactcatcaacaacaactggggattccggcccaagnnnctcaacttcaagctcttcaacatccaggtcaaggaggtcacgacgaatgatggcaccacgaccatcgccaataaccttaccagcacggttcaggtctttacggactcggaataccagctcccgtacgtcctcggctctgcgcaccagggctgcctgcctccgttcccggcggacgtcttcatgattcctcagtacgggtacctgactctgaacaatggcagtcaggccgtgggccgttcctccttctactgcctggagtactttccttctcaaatgctgagaacgggcaacaactttnnnttcagctacacgtttgaggacgtgccttttcacagcagctacgcgcacagccaaagcctggaccggctgatgaaccccctcatcgaccagtacctgtactacctgtctcggactcagaccacgagtggtaccgcaggaaatcggnnnttgcaattttctcaggccgggcctagtagcatggcgaatcaggccaaaaactggctacccgggccctgctaccggcagcaacgcgtctccaagacannnaatcaaaataacaacagcaactttgcctggaccggtgccaccaagtatcatctgaatggcagagactctctggtaaatcccggtcccgctatggcaacccacaaggacgacgaagacaaattttttccgatgagcggagtcttaatatttgggaaacagggagctggaaatagcaacgtggaccttgacaacgttatgataaccnnngaggaagaaattaaaaccaccaacccagtggccacagaannntacggcacggtggccactaacctgcaatcgnnnaacaccgctcctgctacagggaccgtcaacagtcaaggagccttacctggcatggtctggcagnnncgggacgtgtacctgcagggtcctatctgggccaagattcctcacacggacggacactttcatccctcgccgctgatgggaggctttggactgaaacacccgcctcctcagatcctgattaagaatacacctgttcccgcgaatcctccaactaccttcagtccagctaagtttgcgtcgttcatcacgcagtacagcaccggacaggtcagcgtggaaattgaatgggagctgcagaaagaaaacagcaaacgctggaacccagagattcaatacacttccaactacaacaaatctacaaatgtggactttgctgttgacacaaatggcgtttattctgagcctcgccccatcggcacccgttacctcacccgtaatctg

SEQ ID NO: 1845 - protein, 737 aa, Artificial Sequence
  source: /note="Description of Artificial Sequence: Synthetic polypeptide"
  MOD_RES (157)..(157): Any naturally occurring amino acid
  MOD_RES (168)..(168): Any naturally occurring amino acid
  MOD_RES (262)..(263): Any naturally occurring amino acid
  MOD_RES (312)..(312): Any naturally occurring amino acid
  MOD_RES (412)..(412): Any naturally occurring amino acid
  MOD_RES (460)..(461): Any naturally occurring amino acid
  MOD_RES (552)..(552): Any naturally occurring amino acid
  MOD_RES (556)..(557): Any naturally occurring amino acid
  MOD_RES (563)..(563): Any naturally occurring amino acid
  MOD_RES (580)..(580): Any naturally occurring amino acid
  MOD_RES (588)..(588): Any naturally occurring amino acid
  MOD_RES (664)..(664): Any naturally occurring amino acid
MAADGYLPDWLEDNLSEGIREWWDLKPGAPKPKANQQKQDDGRGLVLPGYKYLGPFNGLDKGEPVNAADAAALEHDKAYDQQLKAGDNPYLRYNHADAEFQERLQEDTSFGGNLGRAVFQAKKRVLEPLGLVEEGAKTAPGKKRPVEQSPQEPDSSXGIGKKGQQPAXKRLNFGQTGDSESVPDPQPLGEPPAAPSGVGSNTMAAGGGAPMADNNEGADGVGNASGNWHCDSTWLGDRVITTSTRTWALPTYNNHLYKQISXXQSGGSTNDNTYFGYSTPWGYFDFNRFHCHFSPRDWQRLINNNWGFRPKXLNFKLFNIQVKEVTTNDGTTTIANNLTSTVQVFTDSEYQLPYVLGSAHQGCLPPFPADVFMIPQYGYLTLNNGSQAVGRSSFYCLEYFPSQMLRTGNNFXFSYTFEDVPFHSSYAHSQSLDRLMNPLIDQYLYYLSRTQTTGGTAGNXXLQFSQAGPSSMANQAKNWLPGPCYRQQRVSKTTNQNNNSNFAWTGATKYHLNGRDSLVNPGVAMATHKDDEDRFFPSSGVLIFGKQGAGNXNVDXXNVMITXEEEIKTTNPVATEEYGXVATNLQSXNTAPQTGTVNSQGALPGMVWQNRDVYLQGPIWAKIPHTDGNFHPSPLMGGFGLKHPPPQILIKNTPVPANPPTTFXPAKFASFITQYSTGQVSVEIEWELQKENSKRWNPEIQYTSNYNKSTNVDFAVDTEGVYSEPRPIGTRYLTRNL

SEQ ID NO: 1846 - DNA, 2211 bp, Artificial Sequence
  source: /note="Description of Artificial Sequence: Synthetic polynucleotide"
  modified_base (469)..(471): a, c, t, or g
  modified_base (502)..(504): a, c, t, or g
  modified_base (784)..(789): a, c, t, or g
  modified_base (934)..(936): a, c, t, or g
  modified_base (1234)..(1236): a, c, t, or g
  modified_base (1378)..(1383): a, c, t, or g
  modified_base (1654)..(1656): a, c, t, or g
  modified_base (1666)..(1671): a, c, t, or g
  modified_base (1687)..(1689): a, c, t, or g
  modified_base (1738)..(1740): a, c, t, or g
  modified_base (1762)..(1764): a, c, t, or g
  modified_base (1990)..(1992): a, c, t, or g
atggctgccgatggttatcttccagattggctcgaggacaacctctctgagggcattcgcgagtggtgggacttgaaacctggagccccgaaacccaaagccaaccagcaaaagcaggacgacggccggggtctggtgcttcctggctacaagtacctcggacccttcaacggactcgacaagggggagcccgtcaacgcggcggacgcagcggccctcgagcacgacaaggcctacgaccagcagctcaaagcgggtgacaatccgtacctgcggtataaccacgccgacgccgagtttcaggagcgtctgcaagaagatacgtcttttgggggcaacctcgggcgagcagtcttccaggccaagaagcgggttctcgaacctctcggtctggttgaggaaggcgctaagacggctcctggaaagaagagaccggtagagcaatcaccccaggaaccagactcctctnnnggcatcggcaagaaaggccagcagcccgcgnnnaagagactcaactttgggcagactggcgactcagagtcagtgcccgaccctcaaccactcggagaaccccccgcagccccctctggtgtgggatctaatacaatggctgcaggcggtggcgctccaatggcagacaataacgaaggcgccgacggagtgggtaatgcctcaggaaattggcattgcgattccacatggctgggcgacagagtcatcaccaccagcacccgaacctgggccctccccacctacaacaaccacctctacaagcaaatctccnnnnnncaatcgggaggaagcaccaacgacaacacctacttcggctacagcaccccctgggggtattttgactttaacagattccactgccacttctcaccacgtgactggcagcgactcatcaacaacaactggggattccggcccaagnnnctcaacttcaagctcttcaacatccaggtcaaggaggtcacgacgaatgatggcaccacgaccatcgccaataaccttaccagcacggttcaggtctttacggactcggaataccagctcccgtacgtcctcggctctgcgcaccagggctgcctgcctccgttcccggcggacgtcttcatgattcctcagtacgggtacctgactctgaacaatggcagtcaggccgtgggccgttcctccttctactgcctggagtactttccttctcaaatgctgagaacgggcaacaactttnnnttcagctacacgtttgaggacgtgccttttcacagcagctacgcgcacagccaaagcctggaccggctgatgaaccccctcatcgaccagtacctgtactacctgtctcggactcagaccacgggaggtaccgcaggaaatnnnnnnttgcaattttctcaggccgggcctagtagcatggcgaatcaggccaaaaactggctacccgggccctgctaccggcagcaacgcgtctccaagacaacgaatcaaaataacaacagcaactttgcctggaccggtgccaccaagtatcatctgaatggcagagactctctggtaaatcccggtgtcgctatggcaacccacaaggacgacgaagaccgattttttccgtccagcggagtcttaatatttgggaaacagggagctggaaatnnnaacgtggacnnnnnnaacgttatgataaccnnngaggaagaaattaaaaccaccaacccagtggccacagaagagtacggcnnngtggccactaacctgcaatcgnnnaacaccgctcctcaaacagggaccgtcaacagtcaaggagccttacctggcatggtctggcagaaccgggacgtgtacctgcagggtcctatctgggccaagattcctcacacggacggaaactttcatccctcgccgctgatgggaggctttggactgaaacacccgcctcctcagatcctgattaagaatacacctgttcccgcgaatcctccaactaccttcnnnccagctaagtttgcgtcgttcatcacgcagtacagcaccggacaggtcagcgtggaaattgaatgggagctgcagaaagaaaacagcaaacgctggaacccagagattcaatacacttccaactacaacaaatctacaaatgtggactttgctgttgacacagaaggcgtttattctgagcctcgccccatcggcacccgttacctcacccgtaatctg

SEQ ID NO: 1847 - protein, 738 aa, Artificial Sequence
  source: /note="Description of Artificial Sequence: Synthetic polypeptide"
  MOD_RES (158)..(158): Any naturally occurring amino acid
  MOD_RES (169)..(169): Any naturally occurring amino acid
  MOD_RES (564)..(564): Any naturally occurring amino acid
MAADGYLPDWLEDNLSEGIREWWDLKPGAPKPKANQQKQDDGRGLVLPGYKYLGPFNGLDKGEPVNAADAAALEHDKAYDQQLKAGDNPYLRYNHADAEFQERLQEDTSFGGNLGRAVFQAKKRVLEPLGLVEEGAKTAPGKKRPVEQSPQREPDSSXGIGKKGQQPAXKRLNFGQTGDSESVPDPQPLGEPPAAPSGVGSNTMAAGGGAPMADNNEGADGVGNSSGNWHCDSTWLGDRVITTSTRTWALPTYNNHLYKQISNGTSGGSTNDNTYFGYSTPWGYFDFNRFHCHFSPRDWQRLINNNWGFRPKRLNFKLFNIQVKEVTTNEGTKTIANNLTSTVQVFTDSEYQLPYVLGSAHQGCLPPFPADVFMIPQYGYLTLNNGSQAVGRSSFYCLEYFPSQMLRTGNNFQFSYTFEDVPFHSSYAHSQSLDRLMNPLIDQYLYYLSRTQTTGGTAGTQTLQFSQAGPSSMANQAKNWLPGPCYRQQRVSTTTNQNNNSNFAWTGATKYHLNGRDSLVNPGVAMATHKDDEDRFFPSSGVLIFGKQGAGNDNVDYSNVMITXEEEIKTTNPVATEEYGVVATNLQSANTAPQTGTVNSQGALPGMVWQNRDVYLQGPIWAKIPHTDGNFHPSPLMGGFGLKHPPPQILIKNTPVPADPPTTFNQAKLNSFITQYSTGQVSVEIEWELQKENSKRWNPEIQYTSNYYKSTNVDFAVNTEGVYSEPRPIGTRYLTRNL

SEQ ID NO: 1848 - DNA, 2214 bp, Artificial Sequence
  source: /note="Description of Artificial Sequence: Synthetic polynucleotide"
  modified_base (472)..(474): a, c, t, or g
  modified_base (505)..(507): a, c, t, or g
  modified_base (1690)..(1692): a, c, t, or g
atggctgccgatggttatcttccagattggctcgaggacaacctctctgagggcattcgcgagtggtgggacctgaaacctggagccccgaaacccaaagccaaccagcaaaagcaggacgacggccggggtctggtgcttcctggctacaagtacctcggacccttcaacggactcgacaagggggagcccgtcaacgcggcggacgcagcggccctcgagcacgacaaggcctacgaccagcagctcaaagcgggtgacaatccgtacctgcggtataatcacgccgacgccgagtttcaggagcgtctgcaagaagatacgtcttttgggggcaacctcgggcgagcagtcttccaggccaagaagcgggttctcgaacctctcggtctggttgaggaaggcgctaagacggctcctggaaagaagagaccggtagagcagtcaccacagcgtgagcccgactcctccnnnggcatcggcaagaaaggccagcagcccgccnnnaagagactcaatttcggtcagactggcgactcagagtcagtccccgaccctcaacctctcggagaacctccagcagcgccctctggtgtgggatctaatacaatggctgcaggcggtggcgcaccaatggcagacaataacgaaggtgccgacggagtgggtaattcctcgggaaattggcattgcgattccacatggctgggcgacagagtcatcaccaccagcacccgaacctgggccctgcccacctacaacaaccacctctacaagcaaatctccaacgggacctcgggaggcagcaccaacgacaacacctactttggctacagcaccccctgggggtattttgactttaacagattccactgccacttctcaccacgtgactggcagcgactcatcaacaacaactggggattccggcccaagagactcaacttcaagctcttcaacatccaggtcaaagaggtcacgacgaatgaaggcaccaagaccatcgccaataacctcaccagcaccgtccaggtgtttacggactcggaataccagctgccgtacgtcctcggctctgcccaccagggctgcctgcctccgttcccggcggacgtcttcatgattcctcagtacggctacctgactctcaacaacggtagtcaggccgtgggacgttcctccttctactgcctggagtacttcccctctcagatgctgagaacgggcaacaactttcaattcagctacactttcgaggacgtgcctttccacagcagctacgcgcacagccagagtttggacaggctgatgaatcctctcatcgaccagtacctgtactacctgtcaagaacccagactacgggaggcacagcgggaacccagacgttgcagttttctcaggccgggcctagcagcatggcgaatcaggccaaaaactggctgcctggaccctgctacagacagcagcgcgtctccacgacaacgaatcaaaacaacaacagcaactttgcctggactggtgccaccaagtatcatctgaacggcagagactctctggtgaatccgggcgtcgccatggcaacccacaaggacgacgaggaccgcttcttcccatccagcggcgtcctcatatttggcaagcagggagctggaaatgacaacgtggactatagcaacgtgatgataaccnnngaggaagaaatcaagaccaccaaccccgtggccacagaagagtatggcgtggtggctactaacctacagtcggcaaacaccgctcctcaaacggggaccgtcaacagccagggagccttacctggcatggtctggcagaaccgggacgtgtacctgcagggtcctatttgggccaagattcctcacacagatggcaactttcacccgtctcctttaatgggcggctttggacttaaacatccgcctcctcagatcctcatcaaaaacactcctgttcctgcggatcctccaacaacgttcaaccaggccaagctgaattctttcatcacgcagtacagcaccggacaagtcagcgtggagatcgagtgggagctgcagaaggagaacagcaagcgctggaacccagagattcagtatacttccaactactacaaatctacaaatgtggactttgctgttaatactgagggtgtttactctgagcctcgccccattggcactcgttacctcacccgtaatctg

SEQ ID NO: 1849 - protein, 738 aa, Artificial Sequence
  source: /note="Description of Artificial Sequence: Synthetic polypeptide"
  MOD_RES (158)..(158): Any naturally occurring amino acid
  MOD_RES (169)..(169): Any naturally occurring amino acid
  MOD_RES (315)..(315): Any naturally occurring amino acid
  MOD_RES (413)..(413): Any naturally occurring amino acid
  MOD_RES (472)..(472): Any naturally occurring amino acid
  MOD_RES (534)..(534): Any naturally occurring amino acid
  MOD_RES (542)..(542): Any naturally occurring amino acid
  MOD_RES (595)..(595): Any naturally occurring amino acid
MAADGYLPDWLEDNLSEGIREWWDLKPGAPKPKANQQKQDDGRGLVLPGYKYLGPFNGLDKGEPVNAADAAALEHDKAYDQQLKAGDNPYLRYNHADAEFQERLQEDTSFGGNLGRAVFQAKKRVLEPLGLVEEGAKTAPGKKRPVEQSPQREPDSSXGIGKKGQQPAXKRLNFGQTGDSESVPDPQPLGEPPAAPSGVGSNTMAAGGGAPMADNNEGADGVGSSSGNWHCDSTWLGDRVITTSTRTWALPTYNNHLYKQISNGTSGGSTNDNTYFGYSTPWGYFDFNRFHCHFSPRDWQRLINNNWGFRPKRLXFKLFNIQVKEVTQNEGTKTIANNLTSTIQVFTDSEYQLPYVLGSAHQGCLPPFPADVFMIPQYGYLTLNNGSQAVGRSSFYCLEYFPSQMLRTGNNFXFSYTFEDVPFHSSYAHSQSLDRLMNPLIDQYLYYLSRTQTTGGTAGTQTLQFSQAGPSXMANQAKNWLPGPCYRQQRVSTTTSQNNNSNFAWTGATKYHLNGRDSLVNPGVAMATHKDDEXRFFPSSGXLIFGKQGAGKDNVDYSNVMLTSEEEIKTTNPVATEEYGVVADNLQQQNTAPQXGTVNSQGALPGMVWQNRDVYLQGPIWAKIPHTDGNFHPSPLMGGFGLKHPPPQILIKNTPVPADPPTTFNQAKLNSFITQYSTGQVSVEIEWELQKENSKRWNPEIQYTSNYYKSTNVDFAVNTEGVYSEPRPIGTRYLTRNL

SEQ ID NO: 1850 - DNA, 2214 bp, Artificial Sequence
  source: /note="Description of Artificial Sequence: Synthetic polynucleotide"
  modified_base (472)..(474): a, c, t, or g
  modified_base (505)..(507): a, c, t, or g
  modified_base (943)..(945): a, c, t, or g
  modified_base (1237)..(1239): a, c, t, or g
  modified_base (1414)..(1416): a, c, t, or g
  modified_base (1600)..(1602): a, c, t, or g
  modified_base (1624)..(1626): a, c, t, or g
  modified_base (1783)..(1785): a, c, t, or g
atggctgccgatggttatcttccagattggctcgaggacaacctctctgagggcattcgcgagtggtgggacctgaaacctggagccccgaaacccaaagccaaccagcaaaagcaggacgacggccggggtctggtgcttcctggctacaagtacctcggacccttcaacggactcgacaagggggagcccgtcaacgcggcggacgcagcggccctcgagcacgacaaggcctacgaccagcagctcaaagcgggtgacaatccgtacctgcggtataatcacgccgacgccgagtttcaggagcgtctgcaagaagatacgtcttttgggggcaacctcgggcgagcagtcttccaggccaagaagcgggttctcgaacctctcggtctggttgaggaaggcgctaagacggctcctggaaagaagagaccggtagagcagtcaccacagcgtgagcccgactcctccnnnggcatcggcaagaaaggccagcagcccgccnnnaagagactcaatttcggtcagactggcgactcagagtcagtccccgaccctcaacctctcggagaacctccagcagcgccctctggtgtgggatctaatacaatggctgcaggcggtggcgcaccaatggcagacaataacgaaggtgccgacggagtgggtagttcctcgggaaattggcattgcgattccacatggctgggcgacagagtcatcaccaccagcacccgaacctgggccctgcccacctacaacaaccacctctacaagcaaatctccaacgggacctcgggaggcagcaccaacgacaacacctactttggctacagcaccccctgggggtattttgactttaacagattccactgccacttctcaccacgtgactggcagcgactcatcaacaacaactggggattccggcccaagagactcnnnttcaagctcttcaacatccaggtcaaagaggtcacgcagaatgaaggcaccaagaccatcgccaataacctcaccagcaccatccaggtgtttacggactcggaataccagctgccgtacgtcctcggctctgcccaccagggctgcctgcctccgttcccggcggacgtcttcatgattcctcagtacggctacctgactctcaacaacggtagtcaggccgtgggacgttcctccttctactgcctggagtacttcccctctcagatgctgagaacgggcaacaactttnnnttcagctacactttcgaggacgtgcctttccacagcagctacgcgcacagccagagtttggacaggctgatgaatcctctcatcgaccagtacctgtactacctgtcaagaacccagactacgggaggcacagcgggaacccagacgttgcagttttctcaggccgggcctagcnnnatggcgaatcaggccaaaaactggctgcctggaccctgctacagacagcagcgcgtctccacgacaacgtcgcaaaacaacaacagcaactttgcctggactggtgccaccaagtatcatctgaacggcagagactctctggtgaatccgggcgtcgccatggcaacccacaaggacgacgagnnncgcttcttcccatccagcggcnnnctcatatttggcaagcagggagctggaaaagacaacgtggactatagcaacgtgatgctaaccagcgaggaagaaatcaagaccaccaaccccgtggccacagaagagtatggcgtggtggctgataacctacagcagcaaaacaccgctcctcaannngggaccgtcaacagccagggagccttacctggcatggtctggcagaaccgggacgtgtacctgcagggtcctatttgggccaagattcctcacacagatggcaactttcacccgtctcctttaatgggcggctttggacttaaacatccgcctcctcagatcctcatcaaaaacactcctgttcctgcggatcctccaacaacgttcaaccaggccaagctgaattctttcatcacgcagtacagcaccggacaagtcagcgtggagatcgagtgggagctgcagaaggagaacagcaagcgctggaacccagagattcagtatacttccaactactacaaatctacaaatgtggactttgctgttaatactgagggtgtttactctgagcctcgccccattggcactcgttacctcacccgtaatctg

SEQ ID NO: 1851 - protein, 738 aa, Artificial Sequence
  source: /note="Description of Artificial Sequence: Synthetic polypeptide"
  MOD_RES (169)..(169): Any naturally occurring amino acid
  MOD_RES (315)..(315): Any naturally occurring amino acid
  MOD_RES (534)..(534): Any naturally occurring amino acid
  MOD_RES (542)..(542): Any naturally occurring amino acid
MAADGYLPDWLEDNLSEGIREWWDLKPGAPKPKANQQKQDDGRGLVLPGYKYLGPFNGLDKGEPVNAADAAALEHDKAYDQQLKAGDNPYLRYNHADAEFQERLQEDTSFGGNLGRAVFQAKKRVLEPLGLVEEGAKTAPGKKRPVEPSPQRSPDSSTGIGKKGQQPAXKRLNFGQTGDSESVPDPQPIGEPPAAPSGVGSGTMAAGGGAPMADNNEGADGVGSSSGNWHCDSTWLGDRVITTSTRTWALPTYNNHLYKQISNGTSGGSTNDNTYFGYSTPWGYFDFNRFHCHFSPRDWQRLINNNWGFRPKRLXFKLFNIQVKEVTQNEGTKTIANNLTSTIQVFTDSEYQLPYVLGSAHQGCLPPFPADVFMIPQYGYLTLNNGSQAVGRSSFYCLEYFPSQMLRTGNNFEFSYTFEDVPFHSSYAHSQSLDRLMNPLIDQYLYYLSRTQSTGGTAGTQQLLFSQAGPSNMSAQAKNWLPGPCYRQQRVSTTLSQNNNSNFAWTGATKYHLNGRDSLVNPGVAMATHKDDEXRFFPSSGXLMFGKQGAGKDNVDYSNVMLTSEEEIKTTNPVATEQYGVVADNLQQQNTAPIVGAVNSQGALPGMVWQNRDVYLQGPIWAKIPHTDGNFHPSPLMGGFGLKHPPPQILIKNTPVPADPPTTFNQAKLNSFITQYSTGQVSVEIEWELQKENSKRWNPEIQYTSNYYKSTNVDFAVNTEGVYSEPRPIGTRYLTRNL

SEQ ID NO: 1852 - DNA, 2214 bp, Artificial Sequence
  source: /note="Description of Artificial Sequence: Synthetic polynucleotide"
  modified_base (505)..(507): a, c, t, or g
  modified_base (943)..(945): a, c, t, or g
  modified_base (1600)..(1602): a, c, t, or g
  modified_base (1624)..(1626): a, c, t, or g
atggctgccgatggttatcttccagattggctcgaggacaacctctctgagggcattcgcgagtggtgggacctgaaacctggagccccgaaacccaaagccaaccagcaaaagcaggacgacggccggggtctggtgcttcctggctacaagtacctcggacccttcaacggactcgacaagggggagcccgtcaacgcggcggacgcagcggccctcgagcacgacaaggcctacgaccagcagctcaaagcgggtgacaatccgtacctgcggtataatcacgccgacgccgagtttcaggagcgtctgcaagaagatacgtcttttgggggcaacctcgggcgagcagtcttccaggccaagaagcgggttctcgaacctctcggtctggttgaggaaggcgctaagacggctcctggaaagaagagaccggtagagccgtcaccacagcgttcccccgactcctccacgggcatcggcaagaaaggccagcagcccgccnnnaagagactcaatttcggtcagactggcgactcagagtcagtccccgaccctcaacctatcggagaacctccagcagcgccctctggtgtgggatctggtacaatggctgcaggcggtggcgcaccaatggcagacaataacgaaggtgccgacggagtgggtagttcctcgggaaattggcattgcgattccacatggctgggcgacagagtcatcaccaccagcacccgaacctgggccctgcccacctacaacaaccacctctacaagcaaatctccaacgggacctcgggaggcagcaccaacgacaacacctactttggctacagcaccccctgggggtattttgactttaacagattccactgccacttctcaccacgtgactggcagcgactcatcaacaacaactggggattccggcccaagagactcnnnttcaagctcttcaacatccaggtcaaagaggtcacgcagaatgaaggcaccaagaccatcgccaataacctcaccagcaccatccaggtgtttacggactcggaataccagctgccgtacgtcctcggctctgcccaccagggctgcctgcctccgttcccggcggacgtcttcatgattcctcagtacggctacctgactctcaacaacggtagtcaggccgtgggacgttcctccttctactgcctggagtacttcccctctcagatgctgagaacgggcaacaactttgagttcagctacactttcgaggacgtgcctttccacagcagctacgcgcacagccagagtttggacaggctgatgaatcctctcatcgaccagtacctgtactacctgtcaagaacccagtctacgggaggcacagcgggaacccagcagttgctgttttctcaggccgggcctagcaacatgtcggctcaggccaaaaactggctgcctggaccctgctacagacagcagcgcgtctccacgacactgtcgcaaaacaacaacagcaactttgcctggactggtgccaccaagtatcatctgaacggcagagactctctggtgaatccgggcgtcgccatggcaacccacaaggacgacgagnnncgcttcttcccatccagcggcnnnctcatgtttggcaagcagggagctggaaaagacaacgtggactatagcaacgtgatgctaaccagcgaggaagaaatcaagaccaccaaccccgtggccacagaacagtatggcgtggtggctgataacctacagcagcaaaacaccgctcctattgtgggggccgtcaacagccagggagccttacctggcatggtctggcagaaccgggacgtgtacctgcagggtcctatttgggccaagattcctcacacagatggcaactttcacccgtctcctttaatgggcggctttggacttaaacatccgcctcctcagatcctcatcaaaaacactcctgttcctgcggatcctccaacaacgttcaaccaggccaagctgaattctttcatcacgcagtacagcaccggacaagtcagcgtggagatcgagtgggagctgcagaaggagaacagcaagcgctggaacccagagattcagtatacttccaactactacaaatctacaaatgtggactttgctgttaatactgagggtgtttactctgagcctcgccccattggcactcgttacctcacccgtaatctg

SEQ ID NO: 1853 - protein, 738 aa, Artificial Sequence
  source: /note="Description of Artificial Sequence: Synthetic polypeptide"
  MOD_RES (471)..(471): Any naturally occurring amino acid
MAADGYLPDWLEDNLSEGIREWWDLKPGAPKPKANQQKQDDGRGLVLPGYKYLGPFNGLDKGEPVNAADAAALEHDKAYDQQLKAGDNPYLRYNHADAEFQERLQEDTSFGGNLGRAVFQAKKRVLEPLGLVEEGAKTAPGKKRPVEPSPQRSPDSSTGIGKKGQQPAKKRLNFGQTGDSESVPDPQPIGEPPAGPSGLGSGTMAAGGGAPMADNNEGADGVGSSSGNWHCDSTWLGDRVITTSTRTWALPTYNNHLYKQISNGTSGGSTNDNTYFGYSTPWGYFDFNRFHCHFSPRDWQRLINNNWGFRPKRLNFKLFNIQVKEVTQNEGTKTIANNLTSTIQVFTDSEYQLPYVLGSAHQGCLPPFPADVFMIPQYGYLTLNNGSQAVGRSSFYCLEYFPSQMLRTGNNFEFSYTFEDVPFHSSYAHSQSLDRLMNPLIDQYLYYLSRTQSTGGTAGTQQLLFSQAGPXNMSAQAKNWLPGPCYRQQRVSTTLSQNNNSNFAWTGATKYHLNGRDSLVNPGVAMATHKDDEERFFPSSGVLMFGKQGAGKDNVDYSSVMLTSEEEIKTTNPVATEQYGVVADNLQQQNTAPIVGAVNSQGALPGMVWQNRDVYLQGPIWAKIPHTDGNFHPSPLMGGFGLKHPPPQILIKNTPVPADPPTTFSQAKLASFITQYSTGQVSVEIEWELQKENSKRWNPEIQYTSNYYKSTNVDFAVNTEGTYSEPRPIGTRYLTRNL

SEQ ID NO: 1854 - DNA, 2214 bp, Artificial Sequence
  source: /note="Description of Artificial Sequence: Synthetic polynucleotide"
  modified_base (1411)..(1413): a, c, t, or g
atggctgccgatggttatcttccagattggctcgaggacaacctctctgagggcattcgcgagtggtgggacttgaaacctggagccccgaaacccaaagccaaccagcaaaagcaggacgacggccggggtctggtgcttcctggctacaagtacctcggacccttcaacggactcgacaagggggagcccgtcaacgcggcggacgcagcggccctcgagcacgacaaggcctacgaccagcagctcaaagcgggtgacaatccgtacctgcggtataaccacgccgacgccgagtttcaggagcgtctgcaagaagatacgtcttttgggggcaacctcgggcgagcagtcttccaggccaagaagcgggttctcgaacctctcggtctggttgaggaaggcgctaagacggctcctggaaagaagagaccggtagagccatcaccccagcgttctccagactcctctacgggcatcggcaagaaaggccagcagcccgcgaaaaagagactcaactttgggcagactggcgactcagagtcagtgcccgaccctcaaccaatcggagaaccccccgcaggcccctctggtctgggatctggtacaatggctgcaggcggtggcgctccaatggcagacaataacgaaggcgccgacggagtgggtagttcctcaggaaattggcattgcgattccacatggctgggcgacagagtcatcaccaccagcacccgaacctgggccctccccacctacaacaaccacctctacaagcaaatctccaacgggacttcgggaggaagcaccaacgacaacacctacttcggctacagcaccccctgggggtattttgactttaacagattccactgccacttctcaccacgtgactggcagcgactcatcaacaacaactggggattccggcccaagagactcaacttcaagctcttcaacatccaggtcaaggaggtcacgcagaatgaaggcaccaagaccatcgccaataaccttaccagcacgattcaggtctttacggactcggaataccagctcccgtacgtcctcggctctgcgcaccagggctgcctgcctccgttcccggcggacgtcttcatgattcctcagtacgggtacctgactctgaacaatggcagtcaggccgtgggccgttcctccttctactgcctggagtactttccttctcaaatgctgagaacgggcaacaactttgagttcagctacacgtttgaggacgtgccttttcacagcagctacgcgcacagccaaagcctggaccggctgatgaaccccctcatcgaccagtacctgtactacctgtctcggactcagtccacgggaggtaccgcaggaactcagcagttgctattttctcaggccgggcctnnnaacatgtcggctcaggccaaaaactggctacccgggccctgctaccggcagcaacgcgtctccacgacactgtcgcaaaataacaacagcaactttgcctggaccggtgccaccaagtatcatctgaatggcagagactctctggtaaatcccggtgtcgctatggcaacccacaaggacgacgaagagcgattttttccgtccagcggagtcttaatgtttgggaaacagggagctggaaaagacaacgtggactatagcagcgttatgctaaccagtgaggaagaaattaaaaccaccaacccagtggccacagaacagtacggcgtggtggccgataacctgcaacagcaaaacaccgctcctattgtaggggccgtcaacagtcaaggagccttacctggcatggtctggcagaaccgggacgtgtacctgcagggtcctatctgggccaagattcctcacacggacggaaactttcatccctcgccgctgatgggaggctttggactgaaacacccgcctcctcagatcctgattaagaatacacctgttcccgcggatcctccaactaccttcagtcaagctaagctggcgtcgttcatcacgcagtacagcaccggacaggtcagcgtggaaattgaatgggagctgcagaaagaaaacagcaaacgctggaacccagagattcaatacacttccaactactacaaatctacaaatgtggactttgctgttaacacagaaggcacttattctgagcctcgccccatcggcacccgttacctcacccgtaatctg

SEQ ID NO: 1855 - protein, 737 aa, Artificial Sequence
  source: /note="Description of Artificial Sequence: Synthetic polypeptide"
  MOD_RES (148)..(148): Any naturally occurring amino acid
  MOD_RES (169)..(169): Any naturally occurring amino acid
  MOD_RES (314)..(314): Any naturally occurring amino acid
  MOD_RES (466)..(466): Any naturally occurring amino acid
  MOD_RES (563)..(563): Any naturally occurring amino acid
  MOD_RES (580)..(580): Any naturally occurring amino acid
  MOD_RES (588)..(588): Any naturally occurring amino acid
MAADGYLPDWLEDNLSEGIREWWDLKPGAPKPKANQQKQDDGRGLVLPGYKYLGPFNGLDKGEPVNAADAAALEHDKAYDQQLKAGDNPYLRYNHADAEFQERLQEDTSFGGNLGRAVFQAKKRVLEPLGLVEEGAKTAPGKKRPVEXSPQRSPDSSTGIGKKGQQPAXKRLNFGQTGDSESVPDPQPLGEPPAAPSGVGSGTMAAGGGAPMADNNEGADGVGNASGNWHCDSTWLGDRVITTSTRTWALPTYNNHLYKQISSQSAGSTNDNTYFGYSTPWGYFDFNRFHCHFSPRDWQRLINNNWGFRPKKLXFKLFNIQVKEVTTNDGVTTIANNLTSTVQVFSDSEYQLPYVLGSAHQGCLPPFPADVFMIPQYGYLTLNNGSQSVGRSSFYCLEYFPSQMLRTGNNFEFSYTFEDVPFHSSYAHSQSLDRLMNPLIDQYLYYLARTQSTTGGTAGNRELQFXQAGPSTMAEQAKNWLPGPCYRQQRVSKTLDQNNNSNFAWTGATKYHLNGRNSLVNPGVAMATHKDDEDRFFPSSGVLIFGKTGAANKTTLENVLMTXEEEIKTTNPVATEEYGXVSSNLQSXNTAPQTQTVNSQGALPGMVWQNRDVYLQGPIWAKIPHTDGNFHPSPLMGGFGLKHPPPQILIKNTPVPANPPEVFTPAKFASFITQYSTGQVSVEIEWELQKENSKRWNPEIQYTSNYDKSTNVDFAVDSEGVYSEPRPIGTRYLTRNL

SEQ ID NO: 1856 - DNA, 2211 bp, Artificial Sequence
  source: /note="Description of Artificial Sequence: Synthetic polynucleotide"
  modified_base (442)..(444): a, c, t, or g
  modified_base (505)..(507): a, c, t, or g
  modified_base (940)..(942): a, c, t, or g
  modified_base (1396)..(1398): a, c, t, or g
  modified_base (1687)..(1689): a, c, t, or g
  modified_base (1738)..(1740): a, c, t, or g
  modified_base (1762)..(1764): a, c, t, or g
atggctgccgatggttatcttccagattggctcgaggacaacctctctgagggcattcgcgagtggtgggacctgaaacctggagccccgaaacccaaagccaaccagcaaaagcaggacgacggccggggtctggtgcttcctggctacaagtacctcggacccttcaacggactcgacaagggggagcccgtcaacgcggcggacgcagcggccctcgagcacgacaaggcctacgaccagcagctcaaagcgggtgacaatccgtacctgcggtataaccacgccgacgccgagtttcaggagcgtctgcaagaagatacgtcatttgggggcaacctcgggcgagcagtcttccaggccaagaagcgggttctcgaacctctcggtctggttgaggaaggcgctaagacggctcctggaaagaagagaccggtagagnnntcacctcagcgttcccccgactcctccacgggcatcggcaagaaaggccagcagcccgccnnnaagagactcaatttcggtcagactggcgactcagagtcagtccccgaccctcaacctctcggagaacctccagcagcgccctctggtgtgggatctggtacaatggctgcaggcggtggcgcaccaatggcagacaataacgaaggtgccgacggagtgggtaatgcctcaggaaattggcattgcgattccacatggctgggcgacagagtcattaccaccagcacccgaacctgggccctgcccacctacaacaaccacctctacaagcaaatctccagtcaaagtgcaggtagtaccaacgacaacacctacttcggctacagcaccccctgggggtattttgactttaacagattccactgccacttctcaccacgtgactggcagcgactcatcaacaacaactggggattccggcccaagaagctgnnnttcaagctcttcaacatccaggtcaaggaggtcacgacgaatgacggcgttacgaccatcgctaataaccttaccagcacggttcaggtattctcggactcggaataccagctgccgtacgtcctcggctctgcgcaccagggctgcctgcctccgttcccggcggacgtcttcatgattcctcagtacggctacctgactctcaacaatggcagtcagtctgtgggacgttcctccttctactgcctggagtacttcccctctcagatgctgagaacgggcaacaactttgagttcagctacaccttcgaggacgtgcctttccacagcagctacgcacacagccagagcctggaccggctgatgaatcccctcatcgaccagtacttgtactacctggccagaacacagagtaccacaggaggcacagctggcaatcgggaactgcagtttnnncaggccgggccttcaactatggccgaacaagccaagaattggttacctggaccttgctaccggcaacaaagagtctccaaaacgctggatcaaaacaacaacagcaactttgcttggactggtgccaccaaatatcacctgaacggcagaaactcgttggttaatcccggcgtcgccatggcaactcacaaggacgacgaggaccgctttttcccatccagcggagtcctgatttttggaaaaactggagcagctaacaaaactacattggaaaatgtgttaatgacannngaagaagaaattaaaactactaatcctgtagccacggaagaatacgggnnngtcagcagcaacttacaatcgnnnaatactgcaccccagacacaaactgtcaacagccagggagccttacctggcatggtctggcagaaccgggacgtgtacctgcagggtcccatctgggccaagattcctcacacggatggcaactttcacccgtctcctttgatgggcggctttggacttaaacatccgcctcctcagatcctgatcaagaacactcccgttcccgctaatcctccggaggtgtttactcctgccaagtttgcttcgttcatcacacagtacagcaccggacaagtcagcgtggaaatcgagtgggagctgcagaaggaaaacagcaagcgctggaacccggagattcagtacacctccaactatgataagtcgactaatgtggactttgccgttgacagcgagggtgtttactctgagcctcgccctattggcactcgttacctcacccgtaatctg

SEQ ID NO: 1857 - protein, 735 aa, Artificial Sequence
  source: /note="Description of Artificial Sequence: Synthetic polypeptide"
  MOD_RES (162)..(162): Any naturally occurring amino acid
  MOD_RES (168)..(168): Any naturally occurring amino acid
  MOD_RES (224)..(224): Any naturally occurring amino acid
  MOD_RES (310)..(310): Any naturally occurring amino acid
  MOD_RES (410)..(410): Any naturally occurring amino acid
  MOD_RES (446)..(446): Any naturally occurring amino acid
  MOD_RES (461)..(461): Any naturally occurring amino acid
  MOD_RES (471)..(471): Any naturally occurring amino acid
  MOD_RES (708)..(708): Any naturally occurring amino acid
MAADGYLPDWLEDNLSEGIREWWDLKPGAPKPKANQQKQDDGRGLVLPGYKYLGPFNGLDKGEPVNAADAAALEHDKAYDQQLKAGDNPYLRYNHADAEFQERLQEDTSFGGNLGRAVFQAKKRVLEPLGLVEEGAKTAPGKKRPVEQSPQEPDSSSGIGKXGQQPAXKRLNFGQTGDSESVPDPQPLGEPPAAPSGVGSNTMASGGGAPMADNNEGADGVGNXSGNWHCDSTWLGDRVITTSTRTWALPTYNNHLYKQISSQSGASNDNHYFGYSTPWGYFDFNRFHCHFSPRDWQRLINNNWGFRPKXLNFKLFNIQVKEVTTNDGTTTIANNLTSTVQVFTDSEYQLPYVLGSAHQGCLPPFPADVFMIPQYGYLTLNNGSQAVGRSSFYCLEYFPSQMLRTGNNFXFSYTFEDVPFHSSYAHSQSLDRLMNPLIDQYLYYLXRTQTTSGTAQNRELXFSQAGPSSMXNQAKNWLPGPCYRQQRVSKTANDNNNSNFAWTGATKYHLNGRDSLVNPGPAMASHKDDEDKFFPMSGVLIFGKQGAGASNVDLDNVMITDEEEIKTTNPVATEQYGTVATNLQSSNTAPATGTVNSQGALPGMVWQDRDVYLQGPIWAKIPHTDGHFHPSPLMGGFGLKHPPPQILIKNTPVPANPPTTFSPAKFASFITQYSTGQVSVEIEWELQKENSKRWNPEIQYTSNYNKSXNVDFTVDTNGVYSEPRPIGTRYLTRNL

SEQ ID NO: 1858 - DNA, 2205 bp, Artificial Sequence
  source: /note="Description of Artificial Sequence: Synthetic polynucleotide"
  modified_base (484)..(486): a, c, t, or g
  modified_base (502)..(504): a, c, t, or g
  modified_base (670)..(672): a, c, t, or g
  modified_base (928)..(930): a, c, t, or g
  modified_base (1228)..(1230): a, c, t, or g
  modified_base (1336)..(1338): a, c, t, or g
  modified_base (1381)..(1383): a, c, t, or g
  modified_base (1411)..(1413): a, c, t, or g
  modified_base (2122)..(2124): a, c, t, or g
atggctgccgatggttatcttccagattggctcgaggacaacctctctgagggcattcgcgagtggtgggacttgaaacctggagccccgaaacccaaagccaaccagcaaaagcaggacgacggccggggtctggtgcttcctggctacaagtacctcggacccttcaacggactcgacaagggggagcccgtcaacgcggcggatgcagcggccctcgagcacgacaaggcctacgaccagcagctcaaagcgggtgacaatccgtacctgcggtataaccacgccgacgccgagtttcaggagcgtctgcaagaagatacgtcttttgggggcaacctcgggcgagcagtcttccaggccaagaagagggttctcgaacctcttggtctggttgaggaaggtgctaagacggctcctggaaagaaacgtccggtagagcagtcgccacaagagccagactcctcctcgggcattggcaagnnnggccagcagcccgctnnnaagagactcaattttggtcagactggcgactcagagtcagtccccgacccacaacctctcggagaacctccagcagccccctctggtgtgggatctaatacaatggcttcaggcggtggcgcaccaatggcagacaataacgaaggcgccgacggagtgggtaatnnntcaggaaattggcattgcgattccacatggctgggcgacagagtcatcaccaccagcacccgaacatgggccttgcccacctataacaaccacctctacaagcaaatctccagtcaatcaggggccagcaacgacaaccactacttcggctacagcaccccctgggggtattttgatttcaacagattccactgccatttctcaccacgtgactggcagcgactcatcaacaacaattggggattccggcccaagnnnctcaacttcaagctcttcaacatccaagtcaaggaggtcacgacgaatgatggcaccacgaccatcgctaataaccttaccagcacggttcaagtcttcacggactcggagtaccagttgccgtacgtcctcggctctgcgcaccagggctgcctccctccgttcccggcggacgtgttcatgattccgcagtacggctacctaacgctcaacaatggcagccaggcagtgggacggtcatccttttactgcctggaatatttcccatcgcagatgctgagaacgggcaataactttnnnttcagctacaccttcgaggacgtgcctttccacagcagctacgcgcacagccagagcctggaccggctgatgaatcctctcatcgaccagtacctgtattacctgnnnagaactcagactacgtccggaactgcccaaaacagggagttgnnntttagccaggcgggtccatctagcatgnnnaatcaggccaaaaactggctacctggaccctgttaccggcagcagcgcgtttctaaaacagcaaatgacaacaacaacagcaactttgcctggactggtgctacaaaatatcaccttaatgggcgtgattctttagtcaaccctggccctgctatggcctcacacaaagacgacgaagacaagttctttcccatgagcggtgtcttgatttttggaaagcagggcgccggagcttcaaacgttgatttggacaatgtcatgatcacagacgaagaggaaatcaaaaccactaaccccgtggccaccgaacaatatgggactgtggcaaccaatctccagagcagcaacacagcccctgcgaccggaactgtgaattctcagggagccttacctggaatggtgtggcaagacagagacgtatacctgcagggtcctatttgggccaaaattcctcacacggatggacactttcacccgtctcctctcatgggcggctttggacttaagcacccgcctcctcagatcctcatcaaaaacacgcctgttcctgcgaatcctccgacaacgttttcgcctgcaaagtttgcttcattcatcacccagtattccacaggacaagtgagcgtggagattgaatgggagctgcagaaagaaaacagcaaacgctggaatcccgaaatacagtatacatctaactataataaatctnnnaacgttgatttcactgtggacaccaatggagtttatagtgagcctcgccccattggcacccgttacctcacccgtaacctg

SEQ ID NO: 1859 - protein, 735 aa, Artificial Sequence
  source: /note="Description of Artificial Sequence: Synthetic polypeptide"
  MOD_RES (42)..(42): Any naturally occurring amino acid
  MOD_RES (168)..(168): Any naturally occurring amino acid
  MOD_RES (310)..(310): Any naturally occurring amino acid
  MOD_RES (410)..(410): Any naturally occurring amino acid
  MOD_RES (446)..(446): Any naturally occurring amino acid
  MOD_RES (461)..(461): Any naturally occurring amino acid
  MOD_RES (471)..(471): Any naturally occurring amino acid
  MOD_RES (475)..(475): Any naturally occurring amino acid
  MOD_RES (504)..(504): Any naturally occurring amino acid
  MOD_RES (539)..(539): Any naturally occurring amino acid
MAADGYLPDWLEDNLSEGIREWWDLKPGAPQPKANQQHQDDXRGLVLPGYKYLGPFNGLDKGEPVNEADAAALEHDKAYDQQLKAGDNPYLKYNHADAEFQERLQEDTSFGGNLGRAVFQAKKRVLEPLGLVEEAAKTAPGKKRPVEQSPQEPDSSSGIGKSGQQPAXKRLNFGQTGDSESVPDPQPLGEPPAAPSGVGSNTMASGGGAPMADNNEGADGVGNSSGNWHCDSTWLGDRVITTSTRTWALPTYNNHLYKQISSQSGASNDNHYFGYSTPWGYFDFNRFHCHFSPRDWQRLINNNWGFRPKXLNFKLFNIQVKEVTQNDGTTTIANNLTSTVQVFTDSEYQLPYVLGSAHQGCLPPFPADVFMIPQYGYLTLNNGSQAVGRSSFYCLEYFPSQMLRTGNNFXFSYTFEDVPFHSSYAHSQSLDRLMNPLIDQYLYYLXRTQTTSGTTQQSRLXFSQAGPSSMXQQAXNWLPGPCYRQQRVSKTANDNNNSNFAWTXATKYHLNGRDSLVNPGPAMASHKDDEEKFFPMHGXLIFGKQGTGASNVDLDNVMITDEEEIRTTNPVATEQYGTVATNLQSSNTAPATGTVNSQGALPGMVWQDRDVYLQGPIWAKIPHTDGHFHPSPLMGGFGLKHPPPQILIKNTPVPANPPTTFSPAKFASFITQYSTGQVSVEIEWELQKENSKRWNPEIQYTSNYNKSVNVDFTVDTNGVYSEPRPIGTRYLTRNL

SEQ ID NO: 1860 - DNA, 2205 bp, Artificial Sequence
  source: /note="Description of Artificial Sequence: Synthetic polynucleotide"
  modified_base (124)..(126): a, c, t, or g
  modified_base (502)..(504): a, c, t, or g
  modified_base (928)..(930): a, c, t, or g
  modified_base (1228)..(1230): a, c, t, or g
  modified_base (1336)..(1338): a, c, t, or g
  modified_base (1381)..(1383): a, c, t, or g
  modified_base (1411)..(1413): a, c, t, or g
  modified_base (1423)..(1425): a, c, t, or g
  modified_base (1510)..(1512): a, c, t, or g
  modified_base (1615)..(1617): a, c, t, or g
atggctgctgacggttatcttccagattggctcgaggacaacctttctgaaggcattcgtgagtggtgggatctgaaacctggagcccctcaacccaaagcgaaccaacaacaccaggacgacnnncggggtcttgtgcttccgggttacaaatacctcggaccctttaacggactcgacaaaggagagccggtcaacgaggcggacgcggcagccctcgaacacgacaaagcttacgaccagcagctcaaggccggtgacaacccgtacctcaagtacaaccacgccgacgccgagtttcaggagcgtcttcaagaagatacgtcttttgggggcaaccttggcagagcagtcttccaggccaaaaagagggtccttgagcctcttggtctggttgaggaagcagctaaaacggctcctggaaagaagaggcctgtagaacagtctcctcaggaaccggactcatcatctggtattggcaaatcgggccaacagcctgccnnnaaaagactaaatttcggtcagactggagactcagagtcagtcccagaccctcaacctctcggagaaccaccagcagccccctcaggtgtgggatctaatacaatggcttcaggcggtggcgcaccaatggcagacaataacgagggtgccgatggagtgggtaattcctcaggaaattggcattgcgattccacatggctgggcgacagagtcatcaccaccagcaccagaacctgggccctgcccacttacaacaaccatctctacaagcaaatctccagccaatcaggagcttcaaacgacaaccactactttggctacagcaccccttgggggtattttgactttaacagattccactgccacttctcaccacgtgactggcagcgactcattaacaacaactggggattccggcccaagnnnctcaacttcaagctcttcaacatccaagttaaagaggtcacgcagaacgatggcacgacgactattgccaataaccttaccagcacggttcaagtgtttacggactcggagtatcagctcccgtacgtgctcgggtcggcgcaccaaggctgtctcccgccgtttccagcggacgtcttcatgatccctcagtatggatacctcaccctgaacaacggaagtcaagcggtgggacgctcatccttttactgcctggagtacttcccttcgcagatgctaaggactggaaataacttcnnnttcagctataccttcgaggatgtaccttttcacagcagctacgctcacagccagagtttggatcgcttgatgaatcctcttattgatcagtatctgtactacctgnnnagaacgcaaacaacctctggaacaacccaacaatcacggctgnnntttagccaggctgggccttcgtctatgnnncagcaggccnnnaattggctacctgggccctgctaccggcaacagagagtttcaaagactgctaacgacaacaacaacagtaactttgcttggacannngccaccaaatatcatctcaatggccgcgactcgctggtgaatccaggaccagctatggccagtcacaaggacgatgaagaaaaatttttccctatgcacggcnnnctaatatttggcaaacaagggacaggggcaagtaacgtagatttagataatgtaatgattacggatgaagaagagattcgtaccaccaatcctgtggcaacagagcagtatggaactgtggcaactaacttgcagagctcaaatacagctcccgcgactggaactgtcaatagtcagggggccttacctggcatggtgtggcaagatcgtgacgtgtaccttcaaggacctatctgggcaaagattcctcacacggatggacactttcatccttctcctctgatgggaggctttggactgaaacatccgcctcctcaaatcttgatcaaaaatactccggtaccggcaaatcctccgacgactttcagcccggccaagtttgcttcatttatcactcagtactccactggacaggtcagcgtggaaattgagtgggagctacagaaagaaaacagcaaacgttggaatccagagattcagtacacttccaactacaacaagtctgttaatgtggactttactgtagacactaatggtgtttatagtgaacctcgccctattggaacccggtatctcacacgaaacttg

SEQ ID NO: 1861 - protein, 736 aa, Artificial Sequence; identical to SEQ ID NO: 1569
  source: /note="Description of Artificial Sequence: Synthetic polypeptide"

SEQ ID NO: 1862 - protein, 736 aa, Artificial Sequence; identical to SEQ ID NO: 1570
  source: /note="Description of Artificial Sequence: Synthetic polypeptide"

SEQ ID NO: 1863 - protein, 736 aa, Artificial Sequence; identical to SEQ ID NO: 1571
  source: /note="Description of Artificial Sequence: Synthetic polypeptide"

SEQ ID NO: 1864 - protein, 736 aa, Artificial Sequence; identical to SEQ ID NO: 1572
  source: /note="Description of Artificial Sequence: Synthetic polypeptide"

SEQ ID NO: 1865 - protein, 736 aa, Artificial Sequence; identical to SEQ ID NO: 1573
  source: /note="Description of Artificial Sequence: Synthetic polypeptide"

SEQ ID NO: 1866 - protein, 736 aa, Artificial Sequence; identical to SEQ ID NO: 1574
  source: /note="Description of Artificial Sequence: Synthetic polypeptide"

SEQ ID NO: 1867 - protein, 736 aa, Artificial Sequence; identical to SEQ ID NO: 1575
  source: /note="Description of Artificial Sequence: Synthetic polypeptide"

SEQ ID NO: 1868 - protein, 736 aa, Artificial Sequence; identical to SEQ ID NO: 1576
  source: /note="Description of Artificial Sequence: Synthetic polypeptide"

SEQ ID NO: 1869 - DNA, 2211 bp, Artificial Sequence; identical to SEQ ID NO: 1577
  source: /note="Description of Artificial Sequence: Synthetic polynucleotide"

SEQ ID NO: 1870 - protein, 738 aa, Artificial Sequence; identical to SEQ ID NO: 7
  source: /note="Description of Artificial Sequence: Synthetic polypeptide"

SEQ ID NO: 1871 - protein, 738 aa, Artificial Sequence; identical to SEQ ID NO: 7
  source: /note="Description of Artificial Sequence: Synthetic polypeptide"

SEQ ID NO: 1872 - protein, 738 aa, Artificial Sequence
  source: /note="Description of Artificial Sequence: Synthetic polypeptide"
  MOD_RES (157)..(157): Any naturally occurring amino acid
  MOD_RES (169)..(169): Any naturally occurring amino acid
  MOD_RES (457)..(457): Any naturally occurring amino acid
  MOD_RES (463)..(463): Any naturally occurring amino acid
  MOD_RES (508)..(508): Any naturally occurring amino acid
  MOD_RES (510)..(511): Any naturally occurring amino acid
  MOD_RES (558)..(558): Any naturally occurring amino acid
  MOD_RES (585)..(585): Any naturally occurring amino acid
  MOD_RES (587)..(587): Any naturally occurring amino acid
MAADGYLPDWLEDNLSEGIREWWDLKPGAPKPKANQQKQDDGRGLVLPGYKYLGPFNGLDKGEPVNAADAAALEHDKAYDQQLKAGDNPYLRYNHADAEFQERLQEDTSFGGNLGRAVFQAKKRVLEPLGLVEEGAKTAPGKKRPVEQSPQEPDSSXLGIGKTGQQPAXKRLNFGQTGDSESVPDPQPLGEPPAAPSGVGSNTMASGGGAPMADNNEGADGVGNSSGNWHCDSTWLGDRVITTSTRTWALPTYNNHLYKQISNGTSGGSTNDNTYFGYSTPWGYFDFNRFHCHFSPRDWQRLINNNWGFRPKRLNFKLFNIQVKEVTTNEGTKTIANNLTSTVQVFTDSEYQLPYVLGSAHQGCLPPFPADVFMIPQYGYLTLNNGSQAVGRSSFYCLEYFPSQMLRTGNNFQFSYTFEDVPFHSSYAHSQSLDRLMNPLIDQYLYYLSRTQTTGTXGTQTLXFSQAGPSSMANQARNWVPGPCYRQQRVSTTTNQNNNSNFAWTGAXKXXLNGRDSLMNPGVAMASHKDDEDRFFPSSGVLIFGKQGAGNDNVDYSXVMITNEEEIKTTNPVATEEYGAVATNXQXLANTQAQTGLVHNQGVLPGMVWQNRDVYLQGPIWAKIPHTDGNFHPSPLMGGFGLKHPPPQILIKNTPVPADPPTTFNQAKLNSFITQYSTGQVSVEIEWELQKENSKRWNPEIQYTSNYYKSTNVDFAVNTEGVYSEPRPIGTRYLTRNL

SEQ ID NO: 1873 - DNA, 2211 bp, Artificial Sequence
  source: /note="Description of Artificial Sequence: Synthetic polynucleotide"
  modified_base (469)..(471): a, c, t, or g
  modified_base (502)..(504): a, c, t, or g
  modified_base (1366)..(1368): a, c, t, or g
  modified_base (1384)..(1386): a, c, t, or g
  modified_base (1519)..(1521): a, c, t, or g
  modified_base (1525)..(1530): a, c, t, or g
  modified_base (1669)..(1671): a, c, t, or g
  modified_base (1750)..(1752): a, c, t, or g
  modified_base (1756)..(1758): a, c, t, or g
atggctgccgatggttatcttccagattggctcgaggacaacctctctgagggcattcgcgagtggtgggacttgaaacctggagccccgaaacccaaagccaaccagcaaaagcaggacgacggccggggtctggtgcttcctggctacaagtacctcggacccttcaacggactcgacaagggggagcccgtcaacgcggcggacgcagcggccctcgagcacgacaaagcctacgaccagcagctcaaagcgggtgacaatccgtacctgcggtataatcacgccgacgccgagtttcaggagcgtctgcaagaagatacgtcttttgggggcaacctcgggcgagcagtcttccaggccaagaagcgggttctcgaacctctcggtctggttgaggaaggcgctaagacggctcctggaaagaagaggccggtagagcagtcgccacaagagccagactcctccnnnggcatcggcaagacaggccagcagcccgctnnnaagagactcaattttggtcagactggcgactcagagtcagtccccgacccacaacctctcggagaacctccagcagccccctcaggtgtgggatctaatacaatggcttcaggcggtggcgctccaatggcagacaataacgaaggcgccgacggagtgggtaattcctcgggaaattggcattgcgattccacatggctgggggacagagtcatcaccaccagcacccgaacctgggccctgcccacctacaacaaccacctctacaagcaaatctccaacggcacctcgggaggaagcaccaacgacaacacctattttggctacagcaccccctgggggtattttgacttcaacagattccactgtcacttttcaccacgtgactggcaacgactcatcaacaacaattggggattccggcccaaaagactcaacttcaagctgttcaacatccaggtcaaggaagtcacgacgaacgaaggcaccaagaccatcgccaataatctcaccagcaccgtgcaggtctttacggactcggagtaccagttaccgtacgtgctaggatccgctcaccagggatgtctgcctccgttcccggcggacgtcttcatgattcctcagtacggctatttaactttaaacaatggaagccaagccgtgggacgttcctccttctactgtctggagtatttcccatcgcagatgctgagaaccggcaacaactttcagttcagctacaccttcgaggacgtgcctttccacagcagctacgcgcacagccagagcctggacaggctgatgaatcccctcatcgaccagtacctgtactacctgtccagaacgcaaacgactggaactnnngggacgcagactctgnnnttcagccaagcgggtcctagctcaatggccaaccaggctagaaattgggtgcccggaccttgctaccggcagcagcgcgtctccacgacaaccaaccagaacaacaacagcaactttgcctggacgggagctnnnaagnnnnnnctgaacggccgagactctctaatgaatccgggcgtggcaatggcttcccacaaggatgacgaggaccgcttcttcccttcgagcggggtcctgatttttggcaagcaaggagccgggaacgataatgtggattacagcnnngtgatgattacaaatgaggaagaaatcaagactaccaaccccgtggccacagaagaatatggagcagtggccaccaacnnncagnnngccaatacgcaggcgcagaccggactcgtgcacaaccagggggtgcttcccggcatggtgtggcagaatagagacgtgtacctgcagggtcccatctgggccaaaattcctcacacggacggcaactttcacccgtctcccctgatgggcggctttggactgaagcacccgcctcctcaaattctcatcaagaacacaccggttccagcggacccgccgactaccttcaaccaggccaagctgaactctttcatcacgcagtacagcaccggacaggtcagcgtggaaatcgagtgggagctgcagaaagaaaacagcaaacgctggaatccagagattcaatacacttccaactactacaaatctacaaatgtggactttgctgtcaacacggagggggtttatagcgagcctcgccccattggcacccgttacctcacccgcaacctgtaa

SEQ ID NO: 1874 - protein, 733 aa, Artificial Sequence; identical to SEQ ID NO: 423
  source: /note="Description of Artificial Sequence: Synthetic polypeptide"

SEQ ID NO: 1875 - DNA, 4472 bp, Artificial Sequence
  source: /note="Description of Artificial Sequence: Synthetic polynucleotide"
ctccatcactaggggtaaccgcgaagcgcctcccacgctgccgcgtcagcgctgacgtaaattacgtcataggggagtggtcctgtattagctgtcacgtgagtgcttttgcgacattttgcgacaccacgtggccattcatggtatatatggccgagtgagcgagcaggatctccattttgaccgcgaaatttgaacgagcagcagccatgccgggcttctacgagatcgtgcttaaggtgccgagcgacctggacgagcacctgccgggcatttctgactcgtttgtgaactgggtggcagagaaggaatgggagctgcccccggattctgacatggatcggaatctgattgagcaggcacccctgaccgtggccgagaagctacagcgcgacttcctggtccaatggcgccgcgtgagtaaggccccggaggccctcttctttgttcagttcgagaagggcgagtcctacttccacctccatattctggtagagaccacgggggtcaaatccatggtgctgggccgcttcctgagtcagattcgggacaagctggtgcagaccatctaccgcgggatcgagccgaccctgcccaactggttcgcggtgacaaagacgcgtaatggcgccggaggggggaacaaggtggtggacgagtgctacatccccaactacctgctgcccaagactcagcccgagctgcagtgggcgtggactaacatggaggagtatataagcgcgtgcttgaacctggccgagcgcaaacggctcgtggcgcagcacctgacccacgtcagccagacccaggagcagaacaaggagaatctgaacccgaattctgacgcgcctgtcatccggtcaaaaacctccgcgcgctacatggagctggtcgggtggctggtggaccggggcatcacctccgagaagcagtggatccaggaggaccaggcctcgtacatctccttcaacgccgcctccaactcgcggtctcagatcaaggccgcgctggacaatgccggcaagatcatggcgctgaccaaatccgcgcccgactacctggtaggccccgctctgcccgcggacattaaatccaaccgcatctaccgcatcctggagctgaatggctacgaccctgcctacgccggttccgtctttctcggctgggcccagaaaaagtttggcaaaaggaacaccatctggctgtttgggccggccaccacgggcaagaccaacatcgcggaagccatcgcccacgccgtgcccttctacggctgcgtcaactggaccaatgagaactttcccttcaacgattgcgtcgacaagatggtgatctggtgggaggagggcaagatgacggccaaggtcgtggagtccgccaaggccattctcggcggcagcaaggtgcgcgtggaccaaaagtgcaagtcgtccgcccagatcgatcccacccccgtgatcgtcacctccaacaccaacatgtgcgccgtgattgacgggaacagcaccaccttcgagcaccagcagccgttgcaggaccggatgttcaaatttgaacttacccgccgtctggagcacgactttggcaaggtgacaaagcaggaagtcaaagagttcttccgctgggcgcaggatcacgtgaccgaggtggcgcatgagttctacgtcagaaagggtggagctaacaaaagacccgcccccgatgacgcggatataagcgagcccaagcgggcctgcccctcagtcgcggatccatcgacgtcagacgcggaaggagctccggtggactttgccgacaggtaccaaaacaaatgttctcgtcacgcgggcatgcttcagatgctgtttccctgcaaaacatgcgagagaatgaatcagaatttcaacatttgcttcacgcacgggaccagagactgttcagaatgtttccctggcgtgtcagaatctcaaccggtcgtcagaaaaaagacgtatcggaaactctgtgcgattcatcatctgctggggcgggcacccgagattgcttgctcggcctgcgacctggtcaacgtggacctggatgactgtgtttctgagcaataaatgacttaaaccaggtatggctgccgatggttatcttccagattggctcgaggacaacctctctgagggcattcgcgagtggtgggacctgaaacctggagccccgaaacccaaagccaaccagcaaaagcaggacaacggccggggtctggtgcttcctggctacaagtacctcggacccttcaacggactcgacaagggggagcccgtcaacgcggcggacgcagcggccctcgagcacgacaaggcctacgaccagcagctccaagcgggtgacaatccgtacctgcggtataatcacgccgacgccgagtttcaggagcgtctgcaagaagatacgtcttttgggggcaacctcgggcgcgcagtcttccaggccaaaaagcgggttctcgaacctctgggcctggttgaatcgccggttaagacggctcctggaaagaagagaccggtagagccatcaccccagcgctctccagactcctctacgggcatcggcaagaaaggccagcagcccgcaaaaaagagactcaattttgggcagactggcgactcagagtcagtccccgaccctcaaccaatcggagaaccaccagcaggcccctctggtctgggatctggtacaatggctgcaggcggtggcgctccaatggcagacaataacgaaggcgccgacggagtgggtagttcctcaggaaattggcattgcgattccacatggctgggcgacagagtcatcaccaccagcacccgcacctgggccctgcccacctacaacaaccacctctacaagcaaatctccaacgggacctcgggaggaagcaccaacgacaacacctacttcggctacagcaccccctgggggtattttgacttcaacagattccactgccacttttcaccacgtgactggcagcgactcatcaacaacaactggggattccggcccaagaggctcaacttcaagctcttcaacatccaagtcaaggaggtcacgcagaatgaaggcaccaagaccatcgccaataaccttaccagcacgattcaggtctttacggactcggaataccagctcccgtacgtgctcggctcggcgcaccagggctgcctgcctccgttcccggcggacgtcttcatgattcctcagtacgggtacctgactctgaacaatggcagtcaggctgtgggccggtcgtccttctactgcctggagtactttccttctcaaatgctgagaacgggcaacaactttgaattcagctacaacttcgaggacgtgcccttccacagcagctacgcgcacagccagagcctggaccggctgatgaaccctctcatcgaccagtacttgtactacctgtcccggactcaaagcacgggcggtactgcaggaactcagcagttgctattttctcaggccgggcctaacaacatgtcggctcaggccaagaactggctacccggtccctgctaccggcagcaacgcgtctccacgacactgtcgcagaacaacaacagcaactttgcctggacgggtgccaccaagtatcatctgaatggcagagactctctggtgaatcctggcgttgccatggctacccacaaggacgacgaagagcgattttttccatccagcggagtcttaatgtttgggaaacagggagctggaaaagacaacgtggactatagcagcgtgatgctaaccagcgaggaagaaataaagaccaccaacccagtggccacagaacagtacggcgtggtggccgataacctgcaacagcaaaacgccgctcctattgtaggggccgtcaatagtcaaggagccttacctggcatggtgtggcagaaccgggacgtgtacctgcagggtcccatctgggccaagattcctcatacggacggcaactttcatccctcgccgctgatgggaggctttggactgaagcatccgcctcctcagatcctgattaaaaacacacctgttcccgcggatcctccgaccaccttcactaaggccaagctggcttctttcatcacgcagtacagtaccggccaggtcagcgtggagatcgagtgggagctgcagaaggagaacagcaaacgctggaacccagagattcagtacacttccaactactacaaatctacaaatgtggactttgctgtcaatactgagggtacttattccgagcctcgccccattggcacccgttacctcacccgtaatctgtaattacatgttaatcaataaaccggttaattcgtttcagttgaactttggtctcctgtccttcttatcttatcggttaccatagaaactggttacttattaactgcttggtgcgcttcgcgataaaagacttacgtcatcgggttacccctagtgatgga

SEQ ID NO: 1876 - DNA, 2208 bp, Artificial Sequence
  source: /note="Description of Artificial Sequence: Synthetic polynucleotide"
atggctgccgatggttatcttccagattggctcgaggacactctctctgaaggaataagacagtggtggaagctcaaacctggcccaccaccaccaaagcccgcagagcggcataaggacgacagcaggggtcttgtgcttcctgggtacaagtacctcggacccttcaacggactcgacaagggagagccggtcaacgaggcagacgccgcggccctcgagcacgacaaagcctacgaccggcagctcgacagcggagacaacccgtacctcaagtacaaccacgccgacgcggagtttcaggagcgccttaaagaagatacgtcttttgggggcaacctcggacgagcagtcttccaggcgaaaaagagggttcttgaacctctgggcctggttgaggaacctgttaagaaggctccgggaaaaaagaggccggtagagcactctcctgtggagccagactcctcctcgggaaccggaaaggcgggccagcagcctgcaagaaaaagattgaattttggtcagactggagacgcagactcagtacctgacccccagcctctcggacagccaccagcagccccctctggtctgggaactaataccatggctacaggcagtggcgcaccaatggcagacaataacgagggtgccgacggagtgggtaattcctcgggaaattggcattgcgattccacatggatgggcgacagagtcatcaccaccagcacccgaacctgggccctgcccacctacaacaaccacctctacaaacaaatttccagccaatcaggagcctcgaacgacaatcactactttggctacagcaccccttgggggtattttgacttcaacagattccactgccacttttcaccacgtgactggcaaagactcatcaacaacaactggggattccgacccaagagactcaacttcaagctctttaacattcaagtcaaagaggtcacgcagaatgacggtacgacgacgattgccaataaccttaccagcacggttcaggtgtttactgactcggagtaccagctcccgtacgtcctcggctcggcgcatcaaggatgcctcccgccgttcccagcagacgtcttcatggtgccacagtatggatacctcaccctgaacaacgggagtcaggcagtaggacgctcttcattttactgcctggagtactttccttctcagatgctgcgtaccggaaacaactttaccttcagctacacttttgaggacgttcctttccacagcagctacgctcacagccagagtctggaccgtctcatgaatcctctcatcgaccagtacctgtattacttgagcagaacaaacactccaagtggaaccaccacgcagtcaaggcttcagttttctcaggccggagcgagtgacattcgggaccagtctaggaactggcttcctggaccctgttaccgccagcagcgagtatcaaagacatctgcggataacaacaacagtgaatactcgtggactggagctaccaagtaccacctcaatggcagagactctctggtgaatccgggcccggctatggcaagccacaaggacgatgaagaaaagttttttcctcagagcggggttctcatctttgggaagcaaggctcagagaaaacaaatgtggacattgaaaaggtcatgattacagacgaagaggaaatcaggacaaccaatcccgtggctacggagcagtatggttctgtatctaccaacctccagagaggcaacagacaagcagctaccgcagatgtcaacacacaaggcgttcttccaggcatggtctggcaggacagagatgtgtaccttcaggggcccatctgggcaaagattccacacacggacggacattttcacccctctcccctcatgggtggattcggacttaaacaccctcctccacagattctcatcaagaacaccccggtgcctgcgaatccttcgaccaccttcagtgcggcaaagtttgcttccttcatcacacagtactccacgggacaggtcagcgtggagatcgagtgggagctgcagaaggaaaacagcaaacgctggaatcccgaaattcagtacacttccaactacaacaagtctgttaatgtggactttactgtggacactaatggcgtgtattcagagcctcgccccattggcaccagatacctgactcgtaatctgtaa

SEQ ID NO: 1877 - protein, 735 aa, Artificial Sequence
  source: /note="Description of Artificial Sequence: Synthetic polypeptide"
MAADGYLPDWLEDTLSEGIRQWWKLKPGPPPPKPAERHKDDSRGLVLPGYKYLGPFNGLDKGEPVNEADAAALEHDKAYDRQLDSGDNPYLKYNHADAEFQERLKEDTSFGGNLGRAVFQAKKRVLEPLGLVEEPVKKAPGKKRPVEHSPVEPDSSSGTGKAGQQPARKRLNFGQTGDADSVPDPQPLGQPPAAPSGLGTNTMATGSGAPMADNNEGADGVGNSSGNWHCDSTWMGDRVITTSTRTWALPTYNNHLYKQISSQSGASNDNHYFGYSTPWGYFDFNRFHCHFSPRDWQRLINNNWGFRPKRLNFKLFNIQVKEVTQNDGTTTIANNLTSTVQVFTDSEYQLPYVLGSAHQGCLPPFPADVFMVPQYGYLTLNNGSQAVGRSSFYCLEYFPSQMLRTGNNFTFSYTFEDVPFHSSYAHSQSLDRLMNPLIDQYLYYLSRTNTPSGTTTQSRLQFSQAGASDIRDQSRNWLPGPCYRQQRVSKTSADNNNSEYSWTGATKYHLNGRDSLVNPGPAMASHKDDEEKFFPQSGVLIFGKQGSEKTNVDIEKVMITDEEEIRTTNPVATEQYGSVSTNLQRGNRQAATADVNTQGVLPGMVWQDRDVYLQGPIWAKIPHTDGHFHPSPLMGGFGLKHPPPQILIKNTPVPANPSTTFSAAKFASFITQYSTGQVSVEIEWELQKENSKRWNPEIQYTSNYNKSVNVDFTVDTNGVYSEPRPIGTRYLTRNL

SEQ ID NO: 1878 - DNA, 8376 bp, Artificial Sequence
  source: /note="Description of Artificial Sequence: Synthetic polynucleotide"
aattcccatcatcaataatataccttattttggattgaagccaatatgataatgagggggtggagtttgtgacgtggcgcggggcgtgggaacggggcgggtgacgtagtagtctctagagtcctgtattagaggtcacgtgagtgttttgcgacattttgcgacaccatgtggtcacgctgggtatttaagcccgagtgagcacgcagggtctccattttgaagcgggaggtttgaacgcgcagccaccacgccggggttttacgagattgtgattaaggtccccagcgaccttgacgggcatctgcccggcatttctgacagctttgtgaactgggtggccgagaaggaatgggagttgccgccagattctgacatggatctgaatctgattgagcaggcacccctgaccgtggccgagaagctgcagcgcgactttctgacggaatggcgccgtgtgagtaaggccccggaggcccttttctttgtgcaatttgagaagggagagagctacttccacatgcacgtgctcgtggaaaccaccggggtgaaatccatggttttgggacgtttcctgagtcagattcgcgaaaaactgattcagagaatttaccgcgggatcgagccgactttgccaaactggttcgcggtcacaaagaccagaaatggcgccggaggcgggaacaaggtggtggatgagtgctacatccccaattacttgctccccaaaacccagcctgagctccagtgggcgtggactaatatggaacagtatttaagcgcctgtttgaatctcacggagcgtaaacggttggtggcgcagcatctgacgcacgtgtcgcagacgcaggagcagaacaaagagaatcagaatcccaattctgatgcgccggtgatcagatcaaaaacttcagccaggtacatggagctggtcgggtggctcgtggacaaggggattacctcggagaagcagtggatccaggaggaccaggcctcatacatctccttcaatgcggcctccaactcgcggtcccaaatcaaggctgccttggacaatgcgggaaagattatgagcctgactaaaaccgcccccgactacctggtgggccagcagcccgtggaggacatttccagcaatcggatttataaaattttggaactaaacgggtacgatccccaatatgcggcttccgtctttctgggatgggccacgaaaaagttcggcaagaggaacaccatctggctgtttgggcctgcaactaccgggaagaccaacatcgcggaggccatagcccacactgtgcccttctacgggtgcgtaaactggaccaatgagaactttcccttcaacgactgtgtcgacaagatggtgatctggtgggaggaggggaagatgaccgccaaggtcgtggagtcggccaaagccattctcggaggaagcaaggtgcgcgtggaccagaaatgcaagtcctcggcccagatagacccgactcccgtgatcgtcacctccaacaccaacatgtgcgccgtgattgacgggaactcaacgaccttcgaacaccagcagccgttgcaagaccggatgttcaaatttgaactcacccgccgtctggatcatgactttgggaaggtcaccaagcaggaagtcaaagactttttccggtgggcaaaggatcacgtggttgaggtggagcatgaattctacgtcaaaaagggtggagccaagaaaagacccgcccccagtgacgcagatataagtgagcccaaacgggtgcgcgagtcagttgcgcagccatcgacgtcagacgcggaagcttcgatcaactacgcagacaggtaccaaaacaaatgttctcgtcacgtgggcatgaatctgatgctgtttccctgcagacaatgcgagagaatgaatcagaattcaaatatctgcttcactcacggacagaaagactgtttagagtgctttcccgtgtcagaatctcaacccgtttctgtcgtcaaaaaggcgtatcagaaactgtgctacattcatcatatcatgggaaaggtgccagacgcttgcactgcctgcgatctggtcaatgtggatttggatgactgcatctttgaacaataaatgatttaaatcaggtatggctgccgatggttatcttccagattggctcgaggacactctctctgaaggaataagacagtggtggaagctcaaacctggcccaccaccaccaaagcccgcagagcggcataaggacgacagcaggggtcttgtgcttcctgggtacaagtacctcggacccttcaacggactcgacaagggagagccggtcaacgaggcagacgccgcggccctcgagcacgacaaagcctacgaccggcagctcgacagcggagacaacccgtacctcaagtacaaccacgccgacgcggagtttcaggagcgccttaaagaagatacgtcttttgggggcaacctcggacgagcagtcttccaggcgaaaaagagggttcttgaacctctgggcctggttgaggaacctgttaagacggctccgggaaaaaagaggccggtagagcactctcctgtggagccagactcctcctcgggaaccggaaaggcgggccagcagcctgcaagaaaaagattgaattttggtcagactggagacgcagactcagtacctgacccccagcctctcggacagccaccagcagccccctctggtctgggaactaatacgatggctacaggcagtggcgcaccaatggcagacaataacgagggcgccgacggagtgggtaattcctcgggaaattggcattgcgattccacatggatgggcgacagagtcatcaccaccagcacccgaacctgggccctgcccacctacaacaaccacctctacaaacaaatttccagccaatcaggagcctcgaacgacaatcactactttggctacagcaccccttgggggtattttgacttcaacagattccactgccacttttcaccacgtgactggcaaagactcatcaacaacaactggggattccgacccaagagactcaacttcaagctctttaacattcaagtcaaagaggtcacgcagaatgacggtacgacgacgattgccaataaccttaccagcacggttcaggtgtttactgactcggagtaccagctcccgtacgtcctcggctcggcgcatcaaggatgcctcccgccgttcccagcagacgtcttcatggtgccacagtatggatacctcaccctgaacaacgggagtcaggcagtaggacgctcttcattttactgcctggagtactttccttctcagatgctgcgtaccggaaacaactttaccttcagctacacttttgaggacgttcctttccacagcagctacgctcacagccagagtctggaccgtctcatgaatcctctcatcgaccagtacctgtattacttgagcagaacaaacactccaagtggaaccaccacgcagtcaaggcttcagttttctcaggccggagcgagtgacattcgggaccagtctaggaactggcttcctggaccctgttaccgccagcagcgagtatcaaagacatctgcggataacaacaacagtgaatactcgtggactggagctaccaagtaccacctcaatggcagagactctctggtgaatccgggcccggccatggcaagccacaaggacgatgaagaaaagttttttcctcagagcggggttctcatctttgggaagcaaggctcagagaaaacaaatgtggacattgaaaaggtcatgattacagacgaagaggaaatcaggacaaccaatcccgtggctacggagcagtatggttctgtatctaccaacctccagagaggcaacagacaagcagctaccgcagatgtcaacacacaaggcgttcttccaggcatggtctggcaggacagagatgtgtaccttcaggggcccatctgggcaaagattccacacacggacggacattttcacccctctcccctcatgggtggattcggacttaaacaccctcctccacagattctcatcaagaacaccccggtacctgcgaatccttcgaccaccttcagtgcggcaaagtttgcttccttcatcacacagtactccacgggacaggtcagcgtggagatcgagtgggagctgcagaaggaaaacagcaaacgctggaatcccgaaattcagtacacttccaactacaacaagtctgttaatgtggactttactgtggacactaatggcgtgtattcagagcctcgccccattggcaccagatacctgactcgtaatctgtaattgcttgttaatcaataaaccgtttaattcgtttcagttgaactttggtctctgcgtatttctttcttatctagtttccatgctctagagtcctgtattagaggtcacgtgagtgttttgcgacattttgcgacaccatgtggtcacgctgggtatttaagcccgagtgagcacgcagggtctccattttgaagcgggaggtttgaacgcgcagccaccacggcggggttttacgagattgtgattaaggtccccagcgaccttgacgggcatctgcccggcatttctgacagctttgtgaactgggtggccgagaaggaatgggagttgccgccagattctgacatggatctgaatctgattgagcaggcacccctgaccgtggccgagaagctgcatcgctggcgtaatagcgaagaggcccgcaccgatcgcccttcccaacagttgcgcagcctgaatggcgaatggaattccagacgattgagcgtcaaaatgtaggtatttccatgagcgtttttcctgttgcaatggctggcggtaatattgttctggatattaccagcaaggccgatagtttgagttcttctactcaggcaagtgatgttattactaatcaaagaagtattgcgacaacggttaatttgcgtgatggacagactcttttactcggtggcctcactgattataaaaacacttctcaggattctggcgtaccgttcctgtctaaaatccctttaatcggcctcctgtttagctcccgctctgattctaacgaggaaagcacgttatacgtgctcgtcaaagcaaccatagtacgcgccctgtagcggcgcattaagcgcggcgggtgtggtggttacgcgcagcgtgaccgctacacttgccagcgccctagcgcccgctcctttcgctttcttcccttcctttctcgccacgttcgccggctttccccgtcaagctctaaatcgggggctccctttagggttccgatttagtgctttacggcacctcgaccccaaaaaacttgattagggtgatggttcacgtagtgggccatcgccctgatagacggtttttcgccctttgacgttggagtccacgttctttaatagtggactcttgttccaaactggaacaacactcaaccctatctcggtctattcttttgatttataagggattttgccgatttcggcctattggttaaaaaatgagctgatttaacaaaaatttaacgcgaattttaacaaaatattaacgtttacaatttaaatatttgcttatacaatcttcctgtttttggggcttttctgattatcaaccggggtacatatgattgacatgctagttttacgattaccgttcatcgattctcttgtttgctccagactctcaggcaatgacctgatagcctttgtagagacctctcaaaaatagctaccctctccggcatgaatttatcagctagaacggttgaatatcatattgatggtgatttgactgtctccggcctttctcacccgtttgaatctttacctacacattactcaggcattgcatttaaaatatatgagggttctaaaaatttttatccttgcgttgaaataaaggcttctcccgcaaaagtattacagggtcataatgtttttggtacaaccgatttagctttatgctctgaggctttattgcttaattttgctaattctttgccttgcctgtatgatttattggatgttggaattcctgatgcggtattttctccttacgcatctgtgcggtatttcacaccgcatatggtgcactctcagtacaatctgctctgatgccgcatagttaagccagccccgacacccgccaacacccgctgacgcgccctgacgggcttgtctgctcccggcatccgcttacagacaagctgtgaccgtctccgggagctgcatgtgtcagaggttttcaccgtcatcaccgaaacgcgcgagacgaaagggcctcgtgatacgcctatttttataggttaatgtcatgataataatggtttcttagacgtcaggtggcacttttcggggaaatgtgcgcggaacccctatttgtttatttttctaaatacattcaaatatgtatccgctcatgagacaataaccctgataaatgcttcaataatattgaaaaaggaagagtatgagtattcaacatttccgtgtcgcccttattcccttttttgcggcattttgccttcctgtttttgctcacccagaaacgctggtgaaagtaaaagatgctgaagatcagttgggtgcacgagtgggttacatcgaactggatctcaacagcggtaagatccttgagagttttcgccccgaagaacgttttccaatgatgagcacttttaaagttctgctatgtggcgcggtattatcccgtattgacgccgggcaagagcaactcggtcgccgcatacactattctcagaatgacttggttgagtactcaccagtcacagaaaagcatcttacggatggcatgacagtaagagaattatgcagtgctgccataaccatgagtgataacactgcggccaacttacttctgacaacgatcggaggaccgaaggagctaaccgcttttttgcacaacatgggggatcatgtaactcgccttgatcgttgggaaccggagctgaatgaagccataccaaacgacgagcgtgacaccacgatgcctgtagcaatggcaacaacgttgcgcaaactattaactggcgaactacttactctagcttcccggcaacaattaatagactggatggaggcggataaagttgcaggaccacttctgcgctcggcccttccggctggctggtttattgctgataaatctggagccggtgagcgtgggtctcgcggtatcattgcagcactggggccagatggtaagccctcccgtatcgtagttatctacacgacggggagtcaggcaactatggatgaacgaaatagacagatcgctgagataggtgcctcactgattaagcattggtaactgtcagaccaagtttactcatatatactttagattgatttaaaacttcatttttaatttaaaaggatctaggtgaagatcctttttgataatctcatgaccaaaatcccttaacgtgagttttcgttccactgagcgtcagaccccgtagaaaagatcaaaggatcttcttgagatcctttttttctgcgcgtaatctgctgcttgcaaacaaaaaaaccaccgctaccagcggtggtttgtttgccggatcaagagctaccaactctttttccgaaggtaactggcttcagcagagcgcagataccaaatactgtccttctagtgtagccgtagttaggccaccacttcaagaactctgtagcaccgcctacatacctcgctctgctaatcctgttaccagtggctgctgccagtggcgataagtcgtgtcttaccgggttggactcaagacgatagttaccggataaggcgcagcggtcgggctgaacggggggttcgtgcacacagcccagcttggagcgaacgacctacaccgaactgagatacctacagcgtgagctatgagaaagcgccacgcttcccgaagggagaaaggcggacaggtatccggtaagcggcagggtcggaacaggagagcgcacgagggagcttccagggggaaacgcctggtatctttatagtcctgtcgggtttcgccacctctgacttgagcgtcgatttttgtgatgctcgtcaggggggcggagcctatggaaaaacgccagcaacgcggcctttttacggttcctggccttttgctggccttttgctcacatgttctttcctgcgttatcccctgattctgtggataaccgtattaccgcctttgagtgagctgataccgctcgccgcagccgaacgaccgagcgcagcgagtcagtgagcgaggaagcggaagagcgcccaatacgcaaaccgcctctccccgcgcgttggccgattcattaatgca

SEQ ID NO: 1879 - DNA, 1085 bp, Artificial Sequence
  source: /note="Description of Artificial Sequence: Synthetic polynucleotide"
  modified_base (611)..(611): a, c, t, or g
  modified_base (640)..(640): a, c, t, or g
  modified_base (1039)..(1039): a, c, t, or g
tgcccacttacaacaaccatctctacaagcaaatctccagcvvmdcaggagctascaacgacaaccactactttggctacagcaccccttgggggtattttgactttaacagattccactgccacttctcaccacgtgactggcagcgactcattaacaacaactggggattccggcccaagaaactcagcttcaagctcttcaacatccaagttagaggggtcacgcagaacgatggcacgacgactattgccaataaccttaccagcacggttcaagtgtttacggactcggagtatcagctcccgtacgtgctcgggtcggcgcaccaaggctgtctcccgccgtttccagcggacgtcttcatggtccctcagtatggatacctcaccctgaacaacggaagtcaagcggtgggacgctcatccttttactgcctggagtacttcccttcgcagatgctaaggactggaaataacttccaattcagctataccttcgaggatgtaccttttcacagcagctacgctcacagccagagtttggatcgcttgatgaatcctcttattgatcagtatctgtactacctgaacagaacgcaargcamcvcnrgcggaacarccrvcmhsmrsvvsctgvngtttagccaggctgggcctcagtctatgtctttgcaggccagaaattggctacctgggccctgctaccggcaacagagactttcaamarycbmcrvcsrsaacaacaacagtrastttccttggmcagcggccagcamatatcatctcaatggccgcgactcgctggtgaatccaggaccagctatggccagtcacrrggacgatrmsgrsaratttttccctatgcacggcaatctaatatttggcaaasaarrcrscrvsrvarvcratrycgmsdwcgrsvrsgtaatgattacggatgaagaagagattcgtaccaccaatcctgtggcaacagagcagtatggaactgtggcaaataacttgcagrvsvvsmrsrvcvvscccacgdhtvvsrnsgtcvmscatcagggggccttacctggcatggtgtggcaagatcgt

SEQ ID NO: 1880 - protein, 620 aa, Artificial Sequence
  source: /note="Description of Artificial Sequence: Synthetic polypeptide"
  MOD_RES (263)..(264): Any naturally occurring amino acid
  MOD_RES (267)..(267): Any naturally occurring amino acid
  MOD_RES (450)..(453): Any naturally occurring amino acid
  MOD_RES (456)..(460): Any naturally occurring amino acid
  MOD_RES (462)..(462): Any naturally occurring amino acid
  MOD_RES (491)..(495): Any naturally occurring amino acid
  MOD_RES (500)..(500): Any naturally occurring amino acid
  MOD_RES (504)..(504): Any naturally occurring amino acid
  MOD_RES (508)..(508): Any naturally occurring amino acid
  MOD_RES (528)..(528): Any naturally occurring amino acid
  MOD_RES (531)..(533): Any naturally occurring amino acid
  MOD_RES (546)..(557): Any naturally occurring amino acid
  MOD_RES (586)..(590): Any naturally occurring amino acid
  MOD_RES (593)..(595): Any naturally occurring amino acid
  MOD_RES (597)..(597): Any naturally occurring amino acid
MAADGYLPDWLEDNLSEGIREWWALKPGVPQPKANQQHQDNRRGLVLPGYKYLGPGNGLDKGEPVNEADAAALEHDKAYDQQLKAGDNPYLKYNHADAEFQERLQEDTSFGGNLGRAVFQAKKRILEPLGLVEEAAKTAPGKKGAVDQSPQEPDSSSGVGKSGKQPARKRLNFGQTGDSESVPDPQPLGEPPAAPTSLGSNTMASGGGAPMADNNEGADGVGNSSGNWHCDSQWLGDRVITTSTRTWALPTYNNHLYKQISSXXGAXNDNHYFGYSTPWGYFDFNRFHCHFSPRDWQRLINNNWGFRPKKLSFKLFNIQVRGVTQNDGTTTIANNLTSTVQVFTDSEYQLPYVLGSAHQGCLPPFPADVFMVPQYGYLTLNNGSQAVGRSSFYCLEYFPSQMLRTGNNFQFSYTFEDVPFHSSYAHSQSLDRLMNPLIDQYLYYLNRTQXXXXGTXXXXXLXFSQAGPQSMSLQARNWLPGPCYRQQRLSXXXXXNNNSXFPWXAASXYHLNGRDSLVNPGPAMASHXDDXXXFFPMHGNLIFGKXXXXXXXXXXXXVMITDEEEIRTTNPVATEQYGTVANNLQXXXXXPTXXXVXHQGALPGMVWQDRDVYLQGPIWA

SEQ ID NO: 1881 - DNA, 1491 bp, Artificial Sequence
  source: /note="Description of Artificial Sequence: Synthetic polynucleotide"
accaccagcaccagaacctgggccctgcccacttacaacaaccatctctacaagcaaatctccagccaatcaggagcttcaaacgacaaccactactttggctacagcaccccttgggggtattttgactttaacagattccactgccacttctcaccacgtgactggcagcgactcattaacaacaactggggattccggcccaagaaactcagcttcaagctcttcaacatccaagttagaggggtcacgcagaacgatggcacgacgactattgccaataaccttaccagcacggttcaagtgtttacggactcggagtatcagctcccgtacgtgctcgggtcggcgcaccaaggctgtctcccgccgtttccagcggacgtcttcatggtccctcagtatggatacctcaccctgaacaacggaagtcaagcggtgggacgctcatccttttactgcctggagtacttcccttcgcagatgctaaggactggaaataacttccaattcagctataccttcgaggatgtaccttttcacagcagctacgctcacagccagagtttggatcgcttgatgaatcctcttattgatcagtatctgtactacctgaacagaacgcaaggaacaacctctggaacaaccaaccaatcacggctgctttttagccaggctgggcctcagtctatgtctttgcaggccagaaattggctacctgggccctgctaccggcaacagagactttcaaagactgctaacgacaacaacaacagtaactttccttggacagcggccagcaaatatcatctcaatggccgcgactcgctggtgaatccaggaccagctatggccagtcacaaggacgatgaagaaaaatttttccctatgcacggcaatctaatatttggcaaagaagggacaacggcaagtaacgcagaattagataatgtaatgattacggatgaagaagagattcgtaccaccaatcctgtggcaacagagcagtatggaactgtggcaaataacttgcagagctcaaatacagctcccacgactggaactgtcaatcatcagggggccttacctggcatggtgtggcaagatcgtgacgtctaccttcaaggacctatctgggcaaagattcctcacacggatggacactttcatccttctcctctgatgggaggctttggactgaaacatccgcctcctcaaatcatgatcaaaaatactccggtaccggcaaatcctccgacgactttcagcccggccaagtttgcttcatttatcactcagtactccactggacaggtcagcgtggaaattgagtgggagctacagaaagaaaacagcaaacgttggaatccagagattcagtacacttccaactacaacaagtctgttaatgtggactttactgtagacactaatggtgtttatagtgaacctcgccctattggaacccggtatctcacacgaaacttgtga

SEQ ID NO: 1882 - protein, 482 aa, Artificial Sequence
  source: /note="Description of Artificial Sequence: Synthetic polypeptide"
TTSTRTWALPTYNNHLYKQISSQSGASNDNHYFGYSTPWYFDFNRFHCHFSPRDWQRLNNNWGFRPKKLSFKLFNIQRGVTQNDGTTTIANNLTSTQVFTDSEYQLPYVLGSAHQCLPPFPADVFMVPQYGYLTNNGSQAVGRSSFYCLEYFPQMLRTGNNFQFSYTFEDVPHSSYAHSQSLDRLMNPLIDYLYYLNRTQGTTSGTTNQSLLFSQAGPQSMSLQARNWLGPCYRQQRLSKTANDNNNSFPWTAASKYHLNGRDSLVNGPAMASHKDDEEKFFPMHGLIFGKEGTTASNAELDNVMITDEEEIRTTNPVATEQYGTVANNLQSSNTAPTTGTVNHQGALPGMVWQDRDVYLQGPIWAKIPHTDGHFHPSPLMGGFGLKHPPPQIMIKNTPVPANPPTTFSPAKFASFITQYSTGQVSVEIEWELQKENSKRWNPEIQYTSNYNKSVNVDFTVDTNGVYSEPRPIGTRYLTRNL

SEQ ID NO: 1883 - DNA, 1140 bp, Artificial Sequence
  source: /note="Description of Artificial Sequence: Synthetic polynucleotide"
  modified_base (636)..(636): a, c, t, or g
  modified_base (665)..(665): a, c, t, or g
  modified_base (1064)..(1064): a, c, t, or g
accaccagcaccagaacctgggccctgcccacttacaacaaccatctctacaagcaaatctccagcvvmdcaggagctascaacgacaaccactactttggctacagcaccccttgggggtattttgactttaacagattccactgccacttctcaccacgtgactggcagcgactcattaacaacaactggggattccggcccaagaaactcagcttcaagctcttcaacatccaagttagaggggtcacgcagaacgatggcacgacgactattgccaataaccttaccagcacggttcaagtgtttacggactcggagtatcagctcccgtacgtgctcgggtcggcgcaccaaggctgtctcccgccgtttccagcggacgtcttcatggtccctcagtatggatacctcaccctgaacaacggaagtcaagcggtgggacgctcatccttttactgcctggagtacttcccttcgcagatgctaaggactggaaataacttccaattcagctataccttcgaggatgtaccttttcacagcagctacgctcacagccagagtttggatcgcttgatgaatcctcttattgatcagtatctgtactacctgaacagaacgcaargcamcvcnrgcggaacarccrvcmhsmrsvvsctgvngtttagccaggctgggcctcagtctatgtctttgcaggccagaaattggctacctgggccctgctaccggcaacagagactttcaamarycbmcrvcsrsaacaacaacagtrastttccttggmcagcggccagcamatatcatctcaatggccgcgactcgctggtgaatccaggaccagctatggccagtcacrrggacgatrmsgrsaratttttccctatgcacggcaatctaatatttggcaaasaarrcrscrvsrvarvcratrycgmsdwcgrsvrsgtaatgattacggatgaagaagagattcgtaccaccaatcctgtggcaacagagcagtatggaactgtggcaaataacttgcagrvsvvsmrsrvcvvscccacgdhtvvsrnsgtcvmscatcagggggccttacctggcatggtgtggcaagatcgtgacgtctaccttcaaggacctatctgggca

SEQ ID NO: 1884 - protein, 620 aa, Artificial Sequence; identical to SEQ ID NO: 1880
  source: /note="Description of Artificial Sequence: Synthetic polypeptide"
  MOD_RES (263)..(264): Any naturally occurring amino acid
  MOD_RES (267)..(267): Any naturally occurring amino acid
  MOD_RES (450)..(453): Any naturally occurring amino acid
  MOD_RES (456)..(460): Any naturally occurring amino acid
  MOD_RES (462)..(462): Any naturally occurring amino acid
  MOD_RES (491)..(495): Any naturally occurring amino acid
  MOD_RES (500)..(500): Any naturally occurring amino acid
  MOD_RES (504)..(504): Any naturally occurring amino acid
  MOD_RES (508)..(508): Any naturally occurring amino acid
  MOD_RES (528)..(528): Any naturally occurring amino acid
  MOD_RES (531)..(533): Any naturally occurring amino acid
  MOD_RES (546)..(557): Any naturally occurring amino acid
  MOD_RES (586)..(590): Any naturally occurring amino acid
  MOD_RES (593)..(595): Any naturally occurring amino acid
  MOD_RES (597)..(597): Any naturally occurring amino acid

SEQ ID NO: 1885 - protein, 738 aa, Artificial Sequence; identical to SEQ ID NO: 7
  source: /note="Description of Artificial Sequence: Synthetic polypeptide"

SEQ ID NO: 1886 - DNA, 2258 bp, Artificial Sequence
  source: /note="Description of Artificial Sequence: Synthetic polynucleotide"
tcgaggacaacctctctgagggcattcgcgagtggtgggacttgaaacctggagccccgaaacccaaagccaaccagcaaaagcaggacgacggccggggtctggtgcttcctggctacaagtacctcggacccttcaacggactcgacaagggggagcccgtcaacgcggcggacgcagcggccctcgagcacgacaaggcctacgaccagcagctcaaagcgggtgacaatccgtacctgcggtataaccacgccgacgccgagtttcaggagcgtctgcaagaagatacgtcttttgggggcaacctcgggcgagcagtcttccaggccaagaagcgggttctcgaacctctcggtctggttgaggaaggcgctaagacggctcctggaaagaagagaccggtagagccatcaccccagcgttctccagactcctctacgggcatcggcaagaaaggccagcagcccgcgaaaaagagactcaactttgggcagactggcgactcagagtcagtgcccgaccctcaaccaatcggagaaccccccgcaggcccctctggtctgggatctggtacaatggctgcaggcggtggcgctccaatggcagacaataacgaaggcgccgacggagtgggtagttcctcaggaaattggcattgcgattccacatggctgggcgacagagtcatcaccaccagcacccgaacctgggccctccccacctacaacaaccacctctacaagcaaatctccaacgggacttcgggaggaagcaccaacgacaacacctacttcggctacagcaccccctgggggtattttgactttaacagattccactgccacttctcaccacgtgactggcagcgactcatcaacaacaactggggattccggcccaagagactcaacttcaagctcttcaacatccaggtcaaggaggtcacgcagaatgaaggcaccaagaccatcgccaataaccttaccagcacgattcaggtctttacggactcggaataccagctcccgtacgtcctcggctctgcgcaccagggctgcctgcctccgttcccggcggacgtcttcatgattcctcagtacgggtacctgactctgaacaatggcagtcaggccgtgggccgttcctccttctactgcctggagtactttccttctcaaatgctgagaacgggcaacaactttgagttcagctaccagtttgaggacgtgccttttcacagcagctacgcgcacagccaaagcctggaccggctgatgaaccccctcatcgaccagtacctgtactacctgtctcggactcagtccacgggaggtaccgcaggaactcagcagttgctattttctcaggccgggcctaataacatgtcggctcaggccaaaaactggctacccgggccctgctaccggcagcaacgcgtctccacgacactgtcgcaaaataacaacagcaactttgcctggaccggtgccaccaagtatcatctgaatggcagagactctctggtaaatcccggtgtcgctatggcaacccacaaggacgacgaagagcgattttttccgtccagcggagtcttaatgtttgggaaacagggagctggaaaagacaacgtggactatagcagcgttatgctaaccagtgaggaagaaattaaaaccaccaacccagtggccacagaacagtacggcgtggtggccgataacctgcaacagcaaaacgccgctcctattgtaggggccgtcaacagtcaaggagccttacctggcatggtctggcagaaccgggacgtgtacctgcagggtcctatctgggccaagattcctcacacggacggaaactttcatccctcgccgctgatgggaggctttggactgaaacacccgcctcctcagatcctgattaagaatacacctgttcccgcggatcctccaactaccttcagtcaagctaagctggcgtcgttcatcacgcagtacagcaccggacaggtcagcgtggaaattgaatgggagctgcagaaagaaaacagcaaacgctggaacccagagattcaatacacttccaactactacaaatctacaaatgtggactttgctgttaacacagatggcacttattctgagcctcgccccatcggcacccgttacctcacccgtaatctgtaattgcttgttaatcaataaaccggttgattcgtttcagttgaactttggtctctgcgaagggcgaattcgttt

SEQ ID NO: 1887 - DNA, 2208 bp, Artificial Sequence
  source: /note="Description of Artificial Sequence: Synthetic polynucleotide"
atggctgccgatggttatcttccagattggctcgaggacactctctctgaaggaataagacagtggtggaagctcaaacctggcccaccaccaccaaagcccgcagagcggcataaggacgacagcaggggtcttgtgcttcctgggtacaagtacctcggacccttcaacggactcgacaagggagagccggtcaacgaggcagacgccgcggccctcgagcacgacaaagcctacgaccggcagctcgacagcggagacaacccgtacctcaagtacaaccacgccgacgcggagtttcaggagcgccttaaagaagatacgtcttttgggggcaacctcggacgagcagtcttccaggcgaaaaagagggttcttgaacctctgggcctggttgaggaacctgttaagacggctccgggaaaaaagaggccggtagagcactctcctgtggagccagactcctcctcgggaaccggaaaggcgggccagcagcctgcaagaaaaagattgaattttggtcagactggagacgcagactcagtacctgacccccagcctctcggacagccaccagcagccccctctggtctgggaactaatacgatggctacaggcagtggcgcaccaatggcagacaataacgagggcgccgacggagtgggtaattcctcgggaaattggcattgcgattccacatggatgggcgacagagtcatcaccaccagcacccgaacctgggccctgcccacctacaacaaccacctctacaaacaaatttccagccaatcaggagcctcgaacgacaatcactactttggctacagcaccccttgggggtattttgacttcaacagattccactgccacttttcaccacgtgactggcaaagactcatcaacaacaactggggattccgacccaagagactcaacttcaagctctttaacattcaagtcaaagaggtcacgcagaatgacggtacgacgacgattgccaataaccttaccagcacggttcaggtgtttactgactcggagtaccagctcccgtacgtcctcggctcggcgcatcaaggatgcctcccgccgttcccagcagacgtcttcatggtgccacagtatggatacctcaccctgaacaacgggagtcaggcagtaggacgctcttcattttactgcctggagtactttccttctcagatgctgcgtaccggaaacaactttaccttcagctacacttttgaggacgttcctttccacagcagctacgctcacagccagagtctggaccgtctcatgaatcctctcatcgaccagtacctgtatttcttaagcagaacaaacactccaagtggaaccaccacgcagtcaaggcttcagttttctcaggccggagcgagtgacattcgggaccagtctaggaactggcttcctggaccctgttaccgccagcagcgagtatcaaagacatctgcggataacaacaacagtgaattctcgtggaccggtgctaccaagtaccacctcaatggcagagactctctggtgaatccgggcccggccatggcaagccacaaggacgatgaagaaaagttttttcctcagagcggggttctcatctttgggaagcaaggctcagagaaaacaaatgtggacattgaaaaggtcatgattacagacgaagaggaaatcaggacaaccaatcccgtggctacggagcagtatggttctgtatctaccaacctccagagaggcaacagacaagcagctaccgcagatgtcaacacacaaggcgttcttccaggcatggtctggcaggacagagatgtgtaccttcaggggcccatctgggcaaagattccacacacggacggacattttcacccctctcccctcatgggtggattcggacttaaacaccctcctccacagattctcatcaagaacaccccggtacctgcgaatccttcgaccaccttcagtgcggcaaagtttgcttccttcatcacacagtactccacgggacaggtcagcgtggagatcgagtgggagctgcagaaggaaaacagcaaacgctggaatcccgaaattcagtacacttccaactacaacaagtctgttaatgtggactttactgtggacactaatggcgtgtattcagagcctcgccccattggtaccagattcctgactcgtaatctgtaa

SEQ ID NO: 1888 - protein, 737 aa, Artificial Sequence
  source: /note="Description of Artificial Sequence: Synthetic polypeptide"
MAADGYLPDWLEDNLSEGIREWWDLKPGAPKPKANQQKQDNGRGLVLPGYKYLGPFNGLDKGEPVNAADAAALEHDKAYDQQLQAGDNPYLRYNHADAEFQERLQEDTSFGGNLGRAVFQAKKRVLEPLGLVESPVKTAPGKKRPVEPSPQRSPDSSTGIGKKGQQPAKKRLNFGQTGDSESVPDPQPIGEPPAAPSGVGPNTMAAGGGAPMADNNEGADGVGSSSGNWHCDSTWLGDRVITTSTRTWALPTYNNHLYKQISNGTSGGSTNDNTYFGYSTPWGYFDFNRFHCHFSPRDWQRLINNNWGFRPKRLNFKLFNIQVKEVTQNEGTKTIANNLTSTIQVFTDSEYQLPYVLGSAHQGCLPPFPADVFMIPQYGYLTLNNGSQAVGRSSFYCLEYFPSQMLRTGNNFEFSYNFEDVPFHSSYAHSQSLDRLMNPLIDQYLYYLSRTQSTGGTAGTQQLLFSQAGPNNMSAQAKNWLPGPCYRQQRVSTTLSQNNNSNFAWTGATKYHLNGRDSLVNPGVAMATHKDDEERFFPSSGVLMFGKQGAGKDNVDYSSVMLTSEEEIKTTNPVATEQYGWADNLQQQNAAPIVGAVNSQGALPGMVWQNRDVYLQGPIWAKIPHTDGNFHPSPLMGGFGLKHPPPQILIKNTPVPADPPTTFNQAKLASFITQYSTGQVSVEIEWELQKENSKRWNPEIQYTSNYYKSTNVDFAVNTEGTYSEPRPIGTRYLTRNL

SEQ ID NO: 1889 - DNA, 2211 bp, Artificial Sequence
  source: /note="Description of Artificial Sequence: Synthetic polynucleotide"
atggctgccgatggttatcttccagattggctcgaggacactctctctgaaggaataagacagtggtggaagctcaaacctggcccaccaccaccaaagcccgcagagcggcataaggacgacagcaggggtcttgtgcttcctgggtacaagtacctcggacccttcaacggactcgacaagggagagccggtcaacgaggcagacgccgcggccctcgagcacgacaaagcctacgaccggcagctcgacagcggagacaacccgtacctcaagtacaaccacgccgacgcggagtttcaggagcgccttaaagaagatacgtcttttgggggcaacctcggacgagcagtcttccaggcgaaaaagagggttcttgaacctctgggcctggttgaggaacctgttaagacggctccgggaaaaaagaggccggtagagcactctcctgtggagccagactcctcctcgggaaccggaaaggcgggccagcagcctgcaagaaaaagattgaattttggtcagactggagacgcagactcagtacctgacccccagcctctcggacagccaccagcagccccctctggtctgggaactaatacgatggctacaggcagtggcgcaccaatggcagacaataacgagggcgccgacggagtgggtaattcctcgggaaattggcattgcgattccacatggatgggcgacagagtcatcaccaccagcacccgaacctgggccctgcccacctacaacaaccacctctacaaacaaatttccagcgcttcaacgggagcctcgaacgacaatcactactttggctacagcaccccttgggggtattttgacttcaacagattccactgccacttttcaccacgtgactggcaaagactcatcaacaacaactggggattccgacccaagagactcaacttcaagctctttaacattcaagtcaaagaggtcacgcagaatgacggtacgacgacgattgccaataaccttaccagcacggttcaggtgtttactgactcggagtaccagctcccgtacgtcctcggctcggcgcatcaaggatgcctcccgccgttcccagcagacgtcttcatggtgccacagtatggatacctcaccctgaacaacgggagtcaggcagtaggacgctcttcattttactgcctggagtactttccttctcagatgctgcgtaccggaaacaactttaccttcagctacacttttgaggacgttcctttccacagcagctacgctcacagccagagtctggaccgtctcatgaatcctctcatcgaccagtacctgtattacttgagcagaacaaacactccaagtggaaccaccacgcagtcaaggcttcagttttctcaggccggagcgagtgacattcgggaccagtctaggaactggcttcctggaccctgttaccgccagcagcgagtatcaaagacatctgcggataacaacaacagtgaatactcgtggactggagctaccaagtaccacctcaatggcagagactctctggtgaatccgggcccggccatggcaagccacaaggacgatgaagaaaagttttttcctcagagcggggttctcatctttgggaagcaaggctcagagaaaacaaatgtggacattgaaaaggtcatgattacagacgaagaggaaatcaggacaaccaatcccgtggctacggagcagtatggttctgtatctaccaacctccagagaggcaacagacaagcagctaccgcagatgtcaacacacaaggcgttcttccaggcatggtctggcaggacagagatgtgtaccttcaggggcccatctgggcaaagattccacacacggacggacattttcacccctctcccctcatgggtggattcggacttaaacaccctcctccacagattctcatcaagaacaccccggtacctgcgaatccttcgaccaccttcagtgcggcaaagtttgcttccttcatcacacagtactccacgggacaggtcagcgtggagatcgagtgggagctgcagaaggaaaacagcaaacgctggaatcccgaaattcagtacacttccaactacgccaagtctgtcaatgtggactttactgtggacaataatggcgtgtattcagagcctcgccccattggcaccagatacctgactcgtaatctgtaa

SEQ ID NO: 1890 - DNA, 2208 bp, Artificial Sequence
  source: /note="Description of Artificial Sequence: Synthetic polynucleotide"
atggctgccgatggttatcttccagattggctcgaggacaacctctctgagggcattcgcgagtggtgggacttgaaacctggagccccgaagcccaaagccaaccagcaaaagcaggacgacggccggggtctggtgcttcctggctacaagtacctcggacccttcaacggactcgacaagggggagcccgtcaacgcggcggacgcagcggccctcgagcacgacaaggcctacgaccagcagctcaaagcgggtgacaatccgtacctgcggtataaccacgccgacgccgagtttcaggagcgtctgcaagaagatacgtcttttgggggcaacctcgggcgagcagtcttccaggccaagaagcgggttctcgaacctctcggtctggttgaggaaggcgctaagacggctcctggaaagaaacgtccggtagagcagtcgccacaagagccagactcctcctcgggcatcggcaagacaggccagcagcccgctaaaaagagactcaattttggtcagactggcgactcagagtcagtccccgatccacaacctctcggagaacctccagcaacccccgctgctgtgggacctactacaatggcttcaggcggtggcgcaccaatggcagacaataacgaaggcgccgacggagtgggtaatgcctcaggaaattggcattgcgattccacatggctgggcgacagagtcatcaccaccagcacccgcacctgggccttgcccacctacaataaccacctctacaagcaaatctccagtgcttcaggggccagcaacgacaaccactacttcggctacagcaccccctgggggtattttgatttcaacagattccactgccacttttcaccacgtgactggcagcgactcatcaacaacaattggggattccggcccaagagactcaacttcaaactcttcaacatccaagtcaaggaggtcacgacgaatgatggcgtcacaaccatcgctaataaccttaccagcacggttcaagtcttctcggactcggagtaccagcttccgtacgtcctcggctctgcgcaccagggctgcctccctccgttcccggcggacgtgttcatgattccgcaatacggctacctgacgctcaacaatggcagccaagccgtgggacgttcatccttttactgcctggaatatttcccttctcagatgctgagaacgggcaacaactttaccttcagctacacctttgaggaagtgcctttccacagcagctacgcgcacagccagagcctggaccggctgatgaatcctctcatcgaccaatacctgtattacctgaacagaactcaaaatcagtccggaagtgcccaaaacaaggacttgctgtttagccgtgggtctccagctggcatgtctgttcagcccaaaaactggctacctggaccctgttatcggcagcagcgcgtttctaaaacaaaaacagacaacaacaacagcaattttacctggactggtgcttcaaaatataacctcaatgggcgtgaatccatcatcaaccctggcactgctatggcctcacacaaagacgacgaagacaagttctttcccatgagcggtgtcatgatttttggaaaagagagcgccggagcttcaaacactgcattggacaatgtcatgattacagacgaagaggaaattaaagccactaaccctgtggccaccgaaagatttgggaccgtggcagtcaatttccagagcagcagcacagaccctgcgaccggagatgtgcatgctatgggagcattacctggcatggtgtggcaagatagagacgtgtacctgcagggtcccatttgggccaaaattcctcacacagatggacactttcacccgtctcctcttatgggcggctttggactcaagaacccgcctcctcagatcctcatcaaaaacacgcctgttcctgcgaatcctccggcggagttttcagctacaaagtttgcttcattcatcacccaatactccacaggacaagtgagtgtggaaattgaatgggagctgcagaaagaaaacagcaagcgctggaatcccgaagtgcagtacacatccaattatgcaaaatctgccaacgttgattttactgtggacaacaatggactttatactgagcctcgccccattggcacccgttaccttacccgtcccctgtaa

SEQ ID NO: 1891 - DNA, 2205 bp, Artificial Sequence
  source: /note="Description of Artificial Sequence: Synthetic polynucleotide"
atggctgccgatggttatcttccagattggctcgaggacaacctctdgagggcattcgcgagtggtgggacttgaaacctggagccccgaaacccaaagccaaccagcaaaagcaggacgacggccggggtdggtgcttcctggctacaagtacctcggacccttcaacggactcgacaagggggagcccgtcaacgcggcggatgcagcggccctcgagcacgacaaggcctacgaccagcagctcaaagcgggtgacaatccgtacctgcggtataaccacgccgacgccgagtttcaggagcgtctgcaagaagatacgtcttttgggggcaacctcgggcgagcagtcttccaggccaagaagagggttctcgaaccttttggtdggttgaggaaggtgctaagacggctcctggaaagaaacgtccggtagagcagtcgccacaagagccagactcctcctcgggcattggcaagacaggccagcagcccgctaaaaagagactcaattttggtcagactggcgactcagagtcagtccccgacccacaacctctcggagaacctccagcaacccccgctgctgtgggacctactacaatggcttcaggcggtggcgcaccaatggcagacaataacgaaggcgccgacggagtgggtaatgcctcaggaaattggcattgcgattccacatggctgggcgacagagtcatcaccaccagcacccgaacatgggccttgcccacctataacaaccacctctacaagcaaatctccagtgcttcaggggccagcaacgacaaccactacttcggctacagcaccccctgggggtattttgatttcaacagattccactgccatttctcaccacgtgactggcagcgactcatcaacaacaattggggattccggcccaagagactcaacttcaagctcttcaacatccaagtcaaggaggtcacgacgaatgatggcgtcacgaccatcgctaataaccttaccagcacggttcaagtcttctcggactcggagtaccagttgccgtacgtcctcggctctgcgcaccagggctgcctccctccgttcccggcggacgtgttcatgattccgcagtacggctacctaacgctcaacaatggcagccaggcagtgggacggtcatccttttactgcctggaatatttcccatcgcagatgctgagaacgggcaataactttaccttcagctacaccttcgaggacgtgcctttccacagcagctacgcgcacagccagagcctggaccggctgatgaatcctctcatcgaccagtacctgtattacctgaacagaactcagaatcagtccggaagtgcccaaaacaaggacttgctgtttagccgggggtctccagctggcatgtctgttcagcccaaaaactggctacctggaccctgttaccggcagcagcgcgtttctaaaacaaaaacagacaacaacaacagcaactttacctggactggtgcttcaaaatataaccttaatgggcgtgaatctataatcaaccctggcactgctatggcctcacacaaagacgacaaagacaagttctttcccatgagcggtgtcatgatttttggaaaggagagcgccggagcttcaaacactgcattggacaatgtcatgatcacagacgaagaggaaatcaaagccactaaccccgtggccaccgaaagatttgggactgtggcagtcaatctccagagcagcagcacagaccctgcgaccggagatgtgcatgttatgggagccttacctggaatggtgtggcaagacagagacgtatacctgcagggtcctatttgggccaaaattcctcacacggatggacactttcacccgtctcctctcatgggcggctttggacttaagcacccgcctcctcagatcctcatcaaaaacacgcctgttcctgcgaatcctccggcagagttttcggctacaaagtttgcttcattcatcacccagtattccacaggacaagtgagcgtggagattgaatgggagctgcagaaagaaaacagcaaacgctggaatcccgaagtgcagtatacatctaactatgcaaaatctgccaacgttgatttcactgtggacaacaatggactttatactgagcctcgccccattggcacccgttacctcacccgtcccctgtaa

SEQ ID NO: 1892 - DNA, 2208 bp, Artificial Sequence
  source: /note="Description of Artificial Sequence: Synthetic polynucleotide"
atggctgccgatggttatcttccagattggctcgaggacaacctctctgagggcattcgcgagtggtgggacttgaaacctggagccccgaaacccaaagccaaccagcaaaagcaggacgacggccggggtctggtgcttcctggctacaagtacctcggacccttcaacggactcgacaagggggagcccgtcaacgcggcggatgcagcggccctcgagcacgacaaggcctacgaccagcagctcaaagcgggtgacaatccgtacctgcggtataaccacgccgacgccgagtttcaggagcgtctgcaagaagatacgtcttttgggggcaacctcgggcgagcagtcttccaggccaagaagagggttctcgaaccttttggtctggttgaggaaggtgctaagacggctcctggaaagaaacgtccggtagagcagtcgccacaagagccagactcctcctcgggcattggcaagacaggccagcagcccgctaaaaagagactcaattttggtcagactggcgactcagagtcagtccccgacccacaacctctcggagaacctccagcaacccccgctgctgtgggacctactacaatggcttcaggcggtggcgcaccaatggcagacaataacgaaggcgccgacggagtgggtaatgcctcaggaaattggcattgcgattccacatggctgggcgacagagtcatcaccaccagcacccgaacatgggccttgcccacctataacaaccacctctacaagcaaatctccagtgcttcaggggccagcaacgacaaccactacttcggctacagcaccccctgggggtattttgatttcaacagattccactgccatttctcaccacgtgactggcagcgactcatcaacaacaattggggattccggcccaagagactcaacttcaagctcttcaacatccaagtcaaggaggtcacgacgaatgatggcgtcacgaccatcgctaataaccttaccagcacggttcaagtcttctcggactcggagtaccagttgccgtacgtcctcggctctgcgcaccagggctgcctccctccgttcccggcggacgtgttcatgattccgcagtacggctacctaacgctcaacaatggcagccaggcagtgggacggtcatccttttactgcctggaatatttcccatcgcagatgctgagaacgggcaataactttaccttcagctacaccttcgaggacgtgcctttccacagcagctacgcgcacagccagagcctggaccggctgatgaatcctctcatcgaccagtacctgtattacctgaacagaactcagaatcagtccggaagtgcccaaaacaaggacttgctgtttagccgggggtctccagctggcatgtctgttcagcccaaaaactggctacctggaccctgttaccggcagcagcgcgtttctaaaacaaaaacagacaacaacaacagcaactttacctggactggtgcttcaaaatataaccttaatgggcgtgaatctataatcaaccctggcactgctatggcctcacacaaagacgacgaagacaagttctttcccatgagcggtgtcatgatttttggaaaggagagcgccggagcttcaaacactgcattggacaatgtcatgatcacagacgaagaggaaatcaaagccactaaccccgtggccaccgaaagatttgggactgtggcagtcaatctccagagcagcagcacagaccctgcgaccggagatgtgcatgttatgggagccttacctggaatggtgtggcaagacagagacgtatacctgcagggtcctatttgggccaaaattcctcacacggatggacactttcacccgtctcctctcatgggcggctttggacttaagcacccgcctcctcagatcctcatcaaaaacacgcctgttcctgcgaatcctccggcagagttttcggctacaaagtttgcttcattcatcacccagtattccacaggacaagtgagcgtggagattgaatgggagctgcagaaagaaaacagcaaacgctggaatcccgaagtgcagtatacatctaactatgcaaaatctgccaacgttgatttcactgtggacaacaatggactttatactgagcctcgccccattggcacccgttacctcacccgtcccctgtaa

SEQ ID NO: 1893 - DNA, 2208 bp, Artificial Sequence
  source: /note="Description of Artificial Sequence: Synthetic polynucleotide"
atggctgccgatggttatcttccagattggctcgaggacactctctctgaaggaataagacagtggtggaagctcaaacctggcccaccaccaccaaagcccgcagagcggcataaggacgacagcaggggtcttgtgcttcctgggtacaagtacctcggacccttcaacggactcgacaagggagagccggtcaacgaggcagacgccgcggccctcgagcacgacaaagcctacgaccggcagctcgacagcggagacaacccgtacctcaagtacaaccacgccgacgcggagtttcaggagcgccttaaagaagatacgtcttttgggggcaacctcggacgagcagtcttccaggcgaaaaagagggttcttgaacctctgggcctggttgaggaacctgttaagacggctccgggaaaaaagaggccggtagagcactctcctgtggagccagactcctcctcgggaaccggaaaggcgggccagcagcctgcaagaaaaagattgaattttggtcagactggagacgcagactcagtacctgacccccagcctctcggacagccaccagcagccccctctggtctgggaactaatacgatggctacaggcagtggcgcaccaatggcagacaataacgagggcgccgacggagtgggtaattcctcgggaaattggcattgcgattccacatggatgggcgacagagtcatcaccaccagcacccgaacctgggccctgcccacctacaacaaccacctctacaaacaaatttccagccaatcaggagcctcgaacgacaatcactactttggctacagcaccccttgggggtattttgacttcaacagattccactgccacttttcaccacgtgactggcaaagactcatcaacaacaactggggattccgacccaagagactcaacttcaagctctttaacattcaagtcaaagaggtcacgcagaatgacggtacgacgacgattgccaataaccttaccagcacggttcaggtgtttactgactcggagtaccagctcccgtacgtcctcggctcggcgcatcaaggatgcctcccgccgttcccagcagacgtcttcatggtgccacagtatggatacctcaccctgaacaacgggagtcaggcagtaggacgctcttcattttactgcctggagtactttccttctcagatgctgcgtaccggaaacaactttaccttcagctacacttttgaggacgttcctttccacagcagctacgctcacagccagagtctggaccgtctcatgaatcctctcatcgaccagtacctgtattacttgagcagaacaaacactccaagtggaaccaccacgcagtcaaggcttcagttttctgtggccggacccagtaacatggctgtccagggaaggaactggcttcctggaccctgttaccgccagcagcgagtatcaaagacatctgcggataacaacaacagtgaatttgcttggactggagctaccaagtaccacctcaatggcagagactctctggtgaatccgggcccggccatggcaagccacaaggacgatgaagaaaagttttttcctcagagcggggttctcatctttgggaagcaaggctcagagaaaacaaatgtggacattgaaaaggtcatgattacagacgaagaggaaatcaggacaaccaatcccgtggctacggagcagtatggttctgtatctaccaacctccagcaacagaacacagcaccagctaccgcagatgtcaacacacaaggcgttcttccaggcatggtctggcaggacagagatgtgtaccttcaggggcccatctgggcaaagattccacacacggacggacattttcacccctctcccctcatgggtggattcggacttaaacaccctcctccacagattctcatcaagaacaccccggtacctgcgaatccttcgaccaccttcagtgcggcaaagtttgcttccttcatcacacagtactccacgggacaggtcagcgtggagatcgagtgggagctgcagaaggaaaacagcaaacgctggaatcccgaaattcagtacacttccaactacaacaagtctgttaatgtggactttactgtggacactaatggcgtgtattcagagcctcgccccattggcaccagatacctgactcgtaatctgtaa

SEQ ID NO: 1894 - protein, 735 aa, Artificial Sequence
  source: /note="Description of Artificial Sequence: Synthetic polypeptide"
MAADGYLPDWLEDTLSEGIRQWWKLKPGPPPPKPAERHKDDSRGLVLPGYKYLGPFNGLDKGEPVNEADAAALEHDKAYDRQLDSGDNPYLKYNHADAEFQERLKEDTSFGGNLGRAVFQAKKRVLEPLGLVEEPVKTAPGKKRPVEHSPVEPDSSSGTGKAGQQPARKRLNFGQTGDADSVPDPQPLGQPPAAPSGLGTNTMATGSGAPMADNNEGADGVGNSSGNWHCDSTWMGDRVITTSTRTWALPTYNNHLYKQISSQSGASNDNHYFGYSTPWGYFDFNRFHCHFSPRDWQRLINNNWGFRPKRLNFKLFNIQVKEVTQNDGTTTIANNLTSTVQVFTDSEYQLPYVLGSAHQGCLPPFPADVFMVPQYGYLTLNNGSQAVGRSSFYCLEYFPSQMLRTGNNFTFSYTFEDVPFHSSYAHSQSLDRLMNPLIDQYLYYLSRTNTPSGTTTQSRLQFSVAGPSNMAVQGRNWLPGPCYRQQRVSKTSADNNNSEFAWTGATKYHLNGRDSLVNPGPAMASHKDDEEKFFPQSGVLIFGKQGSEKTNVDIEKVMITDEEEIRTTNPVATEQYGSVSTNLQQQNTAPATADVNTQGVLPGMVWQDRDVYLQGPIWAKIPHTDGHFHPSPLMGGFGLKHPPPQILIKNTPVPANPSTTFSAAKFASFITQYSTGQVSVEIEWELQKENSKRWNPEIQYTSNYNKSVNVDFTVDTNGVYSEPRPIGTRYLTRNL

SEQ ID NO: 1895 - DNA, 2208 bp, Artificial Sequence
  source: /note="Description of Artificial Sequence: Synthetic polynucleotide"
atggctgccgatggttatcttccagattggctcgaggacactctctctgaaggaataagacagtggtggaagctcaaacctggcccaccaccaccaaagcccgcagagcggcataaggacgacagcaggggtcttgtgcttcctgggtacaagtacctcggacccttcaacggactcgacaagggagagccggtcaacgaggcagacgccgcggccctcgagcacgacaaagcctacgaccggcagctcgacagcggagacaacccgtacctcaagtacaaccacgccgacgcggagtttcaggagcgccttaaagaagatacgtcttttgggggcaacctcggacgagcagtcttccaggcgaaaaagaggattcttgaacctctgggcctggttgaggaacctgttaagacggctccgggaaaaaagaggccggtagagcactctcctgcggagccagactcctcctcgggaaccggaaagtcgggccagcagcctgcaagaaaaagattgaattttggtcagactggagacgcagactcagtacctgacccccagcctctcggacagccaccagcagccccctctggtctgggaactaatacgatggcttcaggcagtggcgcaccaatggcagacaataacgagggcgccgacggagtgggtaattcctcgggaaattggcattgcgattccacatggatgggcgacagagtcatcaccaccagcacccgaacctgggccctgcccacctacaacaaccacctctacaaacaaatttccagccaatcaggagcctcgaacgacaatcactactttggctacagcaccccttgggggtattttgacttcaacagattccactgccacttttcaccacgtgactggcaaagactcatcaacaacaactggggattccgacccaagagactcagcttcaagctctttaacattcaagtcaaagaggtcacgcagaatgacggtacgacgacgattgccaataaccttaccagcacggttcaggtgtttactgactcggagtaccagctcccgtacgtcctcggctcggcgcatcaaggatgcctcccgccgttcccagcagacgtcttcatggtgccacagtatggatacctcaccctgaacaacgggagtcaggcagtaggacgctcttcattttactgcctggagtactttccttctcagatgctgcgtaccggaaacaactttaccttcagctacacttttgaggacgttcctttccacagcagctacgctcacagccagagtctggaccgtctcatgaatcctctcatcgaccagtacctgtattacttgagcagaacaaacactccaagtggaaccaccacgatgtcaaggcttcagttttctcaggccggagcgagtgacattcgggaccagtctaggaactggcttcctggaccctgttaccgccagcagcgagtatcaaagacagctgcggataacaacaacagtgattactcgtggactggagctaccaagtaccacctcaatggcagagactctctggtgaatccgggcccggccatggcaagccacaaggacgatgaagaaaagtattttcctcagagcggggttctcatctttgggaagcaagactcaggaaaaacaaatgtggacattgaaaaggtcatgattacagacgaagaggaaatcaggacaaccaatcccgtggctacggagcagtatggttctgtatctaccaacctccagagcggcaacacacaagcagctacctcagatgtcaacacacaaggcgttcttccaggcatggtctggcaggacagagatgtgtaccttcaggggcccatctgggcaaagattccacacacggacggacattttcacccctctcccctcatgggtggattcggacttaaacaccctcctccacagattctcatcaagaacaccccggtacctgcgaatccttcgaccaccttcagtgcggcaaagtttgcttccttcatcacacagtactccacgggacaggtcagcgtggagatcgagtgggagctgcagaaggaaaacagcaaacgctggaatcccgaaattcagtacacttccaactacaacaagtctgttaatgtggactttactgtggacactaatggcgtgtattcagagcctcgccccattggcaccagatacctgactcgtaatctgtaa

SEQ ID NO: 1896 - DNA, 2208 bp, Artificial Sequence
  source: /note="Description of Artificial Sequence: Synthetic polynucleotide"
atggctgccgatggttatcttccagattggctcgaggacactctctctgaaggaataagacagtggtggaagctcaaacctggcccaccaccaccaaagcccgcagagcggcataaggacgacagcaggggtcttgtgcttcctgggtacaagtacctcggacccttcaacggactcgacaagggagagccggtcaacgaggcagacgccgcggccctcgagcacgacaaagcctacgaccggcagctcgacagcggagacaacccgtacctcaagtacaaccacgccgacgcggagtttcaggagcgccttaaagaagatacgtcttttgggggcaacctcggacgagcagtcttccaggcgaaaaagaggattcttgaacctctgggcctggttgaggaacctgttaagacggctccgggaaaaaagaggccggtagagcactctcctgcggagccagactcctcctcgggaaccggaaagtcgggccagcagcctgcaagaaaaagattgaattttggtcagactggagacgcagactcagtacctgacccccagcctctcggacagccaccagcagccccctctggtctgggaactaatacgatggcttcaggcagtggcgcaccaatggcagacaataacgagggcgccgacggagtgggtaattcctcgggaaattggcattgcgattccacatggatgggcgacagagtcatcaccaccagcacccgaacctgggccctgcccacctacaacaaccacctctacaaacaaatttccagccaatcaggagcctcgaacgacaatcactactttggctacagcaccccttgggggtattttgacttcaacagattccactgccacttttcaccacgtgactggcaaagactcatcaacaacaactggggattccgacccaagagactcaacttcaagctctttaacattcaagtcaaagaggtcacgcagaatgacggtacgacgacgattgccaataaccttaccagcacggttcaggtgtttactgactcggagtaccagctcccgtacgtcctcggctcggcgcatcaaggatgcctcccgccgttcccagcagacgtcttcatggtgccacagtatggatacctcaccctgaacaacgggagtcaggcagtaggacgctcttcattttactgcctggagtactttccttctcagatgctgcgtaccggaaacaactttaccttcagctacacttttgaggacgttcctttccacagcagctacgctcacagccagagtctggaccgtctcatgaatcctctcatcgaccagtacctgtattacttgagcagaacaaacactccaagtggaaccaccacgatgtcaaggcttcagttttctcaggccggagcgagtgacattcgggaccagtctaggaactggcttcctggaccctgttaccgccagcagcgagtatcaaagacagctgcggataacaacaacagtgattactcgtggactggagctaccaagtaccacctcaatggcagagactctctggtgaatccgggcccggccatggcaagccacaaggacgatgaagaaaagtattttcctcagagcggggttctcatctttgggaagcaagactcaggaaaaacaaatgtggacattgaaaaggtcatgattacagacgaagaggaaatcaggacaaccaatcccgtggctacggagcagtatggttctgtatctaccaacctccagagcggcaacacacaagcagctacctcagatgtcaacacacaaggcgttcttccaggcatggtctggcaggacagagatgtgtaccttcaggggcccatctgggcaaagattccacacacggacggacattttcacccctctcccctcatgggtggattcggacttaaacaccctcctccacagattctcatcaagaacaccccggtacctgcgaatccttcgaccaccttcagtgcggcaaagtttgcttccttcatcacacagtactccacgggacaggtcagcgtggagatcgagtgggagctgcagaaggaaaacagcaaacgctggaatcccgaaattcagtacacttccaactacaacaagtctgttaatgtggactttactgtggacactaatggcgtgtattcagagcctcgccccattggcaccagatacctgactcgtaatctgtaa

SEQ ID NO: 1897 - protein, 735 aa, Artificial Sequence
  source: /note="Description of Artificial Sequence: Synthetic polypeptide"
MAADGYLPDWLEDTLSEGIRQWWKLKPGPPPPKPAERHKDDSRGLVLPGYKYLGPFNGLDKGEPVNEADAAALEHDKAYDRQLDSGDNPYLKYNHADAEFQERLKEDTSFGGNLGRAVFQAKKRILEPLGLVEEPVKTAPGKKRPVEHSPAEPDSSSGTGKSGQQPARKRLNFGQTGDADSVPDPQPLGQPPAAPSGLGTNTMASGSGAPMADNNEGADGVGNSSGNWHCDSTWMGDRVITTSTRTWALPTYNNHLYKQISSQSGASNDNHYFGYSTPWGYFDFNRFHCHFSPRDWQRLINNNWGFRPKRLNFKLFNIQVKEVTQNDGTTTIANNLTSTVQVFTDSEYQLPYVLGSAHQGCLPPFPADVFMVPQYGYLTLNNGSQAVGRSSFYCLEYFPSQMLRTGNNFTFSYTFEDVPFHSSYAHSQSLDRLMNPLIDQYLYYLSRTNTPSGTTTMSRLQFSQAGASDIRDQSRNWLPGPCYRQQRVSKTAADNNNSDYSWTGATKYHLNGRDSLVNPGPAMASHKDDEEKYFPQSGVLIFGKQDSGKTNVDIEKVMITDEEEIRTTNPVATEQYGSVSTNLQSGNTQAATSDVNTQGVLPGMVWQDRDVYLQGPIWAKIPHTDGHFHPSPLMGGFGLKHPPPQILIKNTPVPANPSTTFSAAKFASFITQYSTGQVSVEIEWELQKENSKRWNPEIQYTSNYNKSVNVDFTVDTNGVYSEPRPIGTRYLTRNL

SEQ ID NO: 1898 - protein, 736 aa, Artificial Sequence
  source: /note="Description of Artificial Sequence: Synthetic polypeptide"
MAADGYLPDWLEDNLSEGIREWWDLKPGAPKPKANQQKQDDGRGLVLPGYKYLGPFNGLDKGEPVNAADAAALEHDKAYDQQLKAGDNPYLRYNHADAEFQERLQEDTSFGGNLGRAVFQAKKRVLEPFGLVEEGAKTAPGKKRPVEQSPQEPDSSSGIGKTGQQPAKKRLNFGQTGDSESVPDPQPLGEPPATPAAVGPTTMASGGGAPMADNNEGADGVGNASGNWHCDSTWLGDRVITTSTRTWALPTYNNHLYKQISSASTGASNDNHYFGYSTPWGYFDFNRFHCHFSPRDWQRLINNNWGFRPKRLNFKLFNIQVKEVTTNDGVTTIANNLTSTVQVFSDSEYQLPYVLGSAHQGCLPPFPADVFMIPQYGYLTLNNGSQAVGRSSFYCLEYFPSQMLRTGNNFTFSYTFEDVPFHSSYAHSQSLDRLMNPLIDQYLYFLNRTQNQSGSAQNKDLLFSRGSPAGMSVQPKNWLPGPCYRQQRVSKTKTDNNNSNFTWTGASKYNLNGRESIINPGTAMASHKDDKDKFFPMSGVMIFGKESAGASNTALDNVMITDEEEIKATNPVATERFGTVAVNLQSSSTDPATGDVHVMGALPGMVWQDRDVYLQGPIWAKIPHTDGHFHPSPLMGGFGLKHPPPQILIKNTPVPANPPAEFSATKFASFITQYSTGQVSVEIEWELQKENSKRWNPEVQYTSNYAKSANVDFTVDNNGLYTEPRPIGTRYLTRPL

SEQ ID NO: 1899 - protein, 747 aa, Artificial Sequence
  source: /note="Description of Artificial Sequence: Synthetic polypeptide"
MAADGYLPDWLEDTLSEGIRQWWKLKPGPPPPKPAERHKDDSRGLVLPGYKYLGPFNGLDKGEPVNEADAAALEHDKAYDRQLDSGDNPYLKYNHADAEFQERLKEDTSFGGNLGRAVFQAKKRVLEPLGLVEEPVKTAPGKKRPVEHSPVEPDSSSGTGKAGQQPARKRLNFGQTGDADSVPDPQPLGQPPAAPSGLGTNTMATGSGAPMADNNEGADGVGNSSGNWHCDSTWMGDRVITTSTRTWALPTYNNHLYKQISSQSGASNDNHYFGYSTPWGYFDFNRFHCHFSPRDWQRLINNNWGFRPKRLNFKLFNIQVKEVTQNDGTTTIANNLTSTVQVFTDSEYQLPYVLGSAHQGCLPPFPADVFMVPQYGYLTLNNGSQAVGRSSFYCLEYFPSQMLRTGNNFTFSYTFEDVPFHSSYAHSQSLDRLMNPLIDQYLYYLSRTNTPSGTTTQSRLQFSQAGASDIRDQSRNWLPGPCYRQQRVSKTSADNNNSEYSWTGATKYHLNGRDSLVNPGPAMASHKDDEEKFFPQSGVLIFGKQGSEKTNVDIEKVMITDEEEIRTTNPVATEQYGSVSTNLQRGNAAAGSTPPPMAARQAATADVNTQGVLPGMVWQDRDVYLQGPIWAKIPHTDGHFHPSPLMGGFGLKHPPPQILIKNTPVPANPSTTFSAAKFASFITQYSTGQVSVEIEWELQKENSKRWNPEIQYTSNYNKSVNVDFTVDTNGVYSEPRPIGTRYLTRNL

SEQ ID NO: 1900 - protein, 747 aa, Artificial Sequence
  source: /note="Description of Artificial Sequence: Synthetic polypeptide"
MAADGYLPDWLEDTLSEGIRQWWKLKPGPPPPKPAERHKDDSRGLVLPGYKYLGPFNGLDKGEPVNEADAAALEHDKAYDRQLDSGDNPYLKYNHADAEFQERLKEDTSFGGNLGRAVFQAKKRVLEPLGLVEEPVKTAPGKKRPVEHSPVEPDSSSGTGKAGQQPARKRLNFGQTGDADSVPDPQPLGQPPAAPSGLGTNTMATGSGAPMADNNEGADGVGNSSGNWHCDSTWMGDRVITTSTRTWALPTYNNHLYKQISSQSGASNDNHYFGYSTPWGYFDFNRFHCHFSPRDWQRLINNNWGFRPKRLNFKLFNIQVKEVTQNDGTTTIANNLTSTVQVFTDSEYQLPYVLGSAHQGCLPPFPADVFMVPQYGYLTLNNGSQAVGRSSFYCLEYFPSQMLRTGNNFTFSYTFEDVPFHSSYAHSQSLDRLMNPLIDQYLYYLSRTNTPSGTTTQSRLQFSQAGASDIRDQSRNWLPGPCYRQQRVSKTSADNNNSEYSWTGATKYHLNGRDSLVNPGPAMASHKDDEEKFFPQSGVLIFGKQGSEKTNVDIEKVMITDEEEIRTTNPVATEQYGSVSTNLQRGNAAAGETRAPLAARQAATADVNTQGVLPGMVWQDRDVYLQGPIWAKIPHTDGHFHPSPLMGGFGLKHPPPQILIKNTPVPANPSTTFSAAKFASFITQYSTGQVSVEIEWELQKENSKRWNPEIQYTSNYNKSVNVDFTVDTNGVYSEPRPIGTRYLTRNL

SEQ ID NO: 1901 - protein, 10 aa, Artificial Sequence
  source: /note="Description of Artificial Sequence: Synthetic peptide"
VNLTWSRASG

SEQ ID NO: 1902 - protein, 14 aa, Artificial Sequence
  source: /note="Description of Artificial Sequence: Synthetic peptide"
EFCINHRGYWVCGD

SEQ ID NO: 1903 - protein, 11 aa, Artificial Sequence
  source: /note="Description of Artificial Sequence: Synthetic peptide"
EDGQVMDVDLS

SEQ ID NO: 1904 - protein, 9 aa, Artificial Sequence
  source: /note="Description of Artificial Sequence: Synthetic peptide"
EKQRNGTLT

SEQ ID NO: 1905 - protein, 17 aa, Artificial Sequence
  source: /note="Description of Artificial Sequence: Synthetic peptide"
TYQCRVTHPHLPRALMR

SEQ ID NO: 1906 - protein, 14 aa, Artificial Sequence
  source: /note="Description of Artificial Sequence: Synthetic peptide"
RHSTTQPRKTKGSG

SEQ ID NO: 1907 - protein, 13 aa, Artificial Sequence
  source: /note="Description of Artificial Sequence: Synthetic peptide"
DSNPRGVSAYLSR

SEQ ID NO: 1908 - protein, 12 aa, Artificial Sequence
  source: /note="Description of Artificial Sequence: Synthetic peptide"
TITCLWDLAPSK

SEQ ID NO: 1909 - protein, 10 aa, Artificial Sequence
  source: /note="Description of Artificial Sequence: Synthetic peptide"
KTKGSGFFVF

SEQ ID NO: 1910 - protein, 12 aa, Artificial Sequence
  source: /note="Description of Artificial Sequence: Synthetic peptide"
THPHLPRALMRS

SEQ ID NO: 1911 - protein, 23 aa, Artificial Sequence
  source: /note="Description of Artificial Sequence: Synthetic peptide"
GETYQCRVTHPHLPRALMRSTTK

SEQ ID NO: 1912 - protein, 8 aa, Artificial Sequence
  source: /note="Description of Artificial Sequence: Synthetic peptide"
LPRALMRS

SEQ ID NO: 1913 - protein, 8 aa, Artificial Sequence
  source: /note="Description of Artificial Sequence: Synthetic peptide"
INHRGYWV

SEQ ID NO: 1914 - protein, 12 aa, Artificial Sequence
  source: /note="Description of Artificial Sequence: Synthetic peptide"
CDAGSVRTNAPD

SEQ ID NO: 1915 - protein, 17 aa, Artificial Sequence
  source: /note="Description of Artificial Sequence: Synthetic peptide"
AKAVSNLTESRSESLQS

SEQ ID NO: 1916 - protein, 13 aa, Artificial Sequence
  source: /note="Description of Artificial Sequence: Synthetic peptide"
SLTGDEFKKVLET

SEQ ID NO: 1917 - protein, 11 aa, Artificial Sequence
  source: /note="Description of Artificial Sequence: Synthetic peptide"
REAVAYRFEED

SEQ ID NO: 1918 - protein, 10 aa, Artificial Sequence
  source: /note="Description of Artificial Sequence: Synthetic peptide"
INPEIITLDG

SEQ ID NO: 1919 - protein, 15 aa, Artificial Sequence
  source: /note="Description of Artificial Sequence: Synthetic peptide"
DISVTGAPVITATYL

SEQ ID NO: 1920 - protein, 12 aa, Artificial Sequence
  source: /note="Description of Artificial Sequence: Synthetic peptide"
DISVTGAPVITA

SEQ ID NO: 1921 - protein, 17 aa, Artificial Sequence
  source: /note="Description of Artificial Sequence: Synthetic peptide"
PKTVSNLTESSSESVQS

SEQ ID NO: 1922 - protein, 13 aa, Artificial Sequence
  source: /note="Description of Artificial Sequence: Synthetic peptide"
SLMGDEFKAVLET

SEQ ID NO: 1923 - protein, 11 aa, Artificial Sequence
  source: /note="Description of Artificial Sequence: Synthetic peptide"
QHSVAYTFEED

SEQ ID NO: 1924 - protein, 10 aa, Artificial Sequence
  source: /note="Description of Artificial Sequence: Synthetic peptide"
INPEIITRDG

SEQ ID NO: 1925 - protein, 15 aa, Artificial Sequence
  source: /note="Description of Artificial Sequence: Synthetic peptide"
DISLTGDPVITASYL

SEQ ID NO: 1926 - protein, 12 aa, Artificial Sequence
  source: /note="Description of Artificial Sequence: Synthetic peptide"
DISLTGDPVITA

SEQ ID NO: 1927 - protein, 11 aa, Artificial Sequence
  source: /note="Description of Artificial Sequence: Synthetic peptide"
DQSIDFEIDSA

SEQ ID NO: 1928 - protein, 20 aa, Artificial Sequence
  source: /note="Description of Artificial Sequence: Synthetic peptide"
KNVSEDLPLPTFSPTLLGDS

SEQ ID NO: 1929 - protein, 11 aa, Artificial Sequence
  source: /note="Description of Artificial Sequence: Synthetic peptide"
KNVSEDLPLPT

SEQ ID NO: 1930 - protein, 12 aa, Artificial Sequence
  source: /note="Description of Artificial Sequence: Synthetic peptide"
CDSGRVRTDAPD

SEQ ID NO: 1931 - protein, 14 aa, Artificial Sequence
  source: /note="Description of Artificial Sequence: Synthetic peptide"
FPEHLLVDFLQSLS

SEQ ID NO: 1932 - protein, 9 aa, Artificial Sequence
  source: /note="Description of Artificial Sequence: Synthetic peptide"
DAEFRHDSG

SEQ ID NO: 1933 - protein, 16 aa, Artificial Sequence
  source: /note="Description of Artificial Sequence: Synthetic peptide"
HYAAAQWDFGNTMCQL

SEQ ID NO: 1934 - protein, 13 aa, Artificial Sequence
  source: /note="Description of Artificial Sequence: Synthetic peptide"
YAAQWDFGNTMCQ

SEQ ID NO: 1935 - protein, 10 aa, Artificial Sequence
  source: /note="Description of Artificial Sequence: Synthetic peptide"
RSQKEGLHYT

SEQ ID NO: 1936 - protein, 19 aa, Artificial Sequence
  source: /note="Description of Artificial Sequence: Synthetic peptide"
SSRTPSDKPVAHWANPQAE

SEQ ID NO: 1937 - protein, 15 aa, Artificial Sequence
  source: /note="Description of Artificial Sequence: Synthetic peptide"
SRTPSDKPVAHWANP

SEQ ID NO: 1938 - protein, 9 aa, Artificial Sequence
  source: /note="Description of Artificial Sequence: Synthetic peptide"
SSRTPSDKP

SEQ ID NO: 1939 - protein, 14 aa, Artificial Sequence
  source: /note="Description of Artificial Sequence: Synthetic peptide"
NADGNVDYHMNSVP

SEQ ID NO: 1940 - protein, 11 aa, Artificial Sequence
  source: /note="Description of Artificial Sequence: Synthetic peptide"
DGNVDYHMNSV

SEQ ID NO: 1941 - protein, 16 aa, Artificial Sequence
  source: /note="Description of Artificial Sequence: Synthetic peptide"
RSFKEFLQSSLRALRQ

SEQ ID NO: 1942 - protein, 11 aa, Artificial Sequence
  source: /note="Description of Artificial Sequence: Synthetic peptide"
FKEFLQSSLRA

SEQ ID NO: 1943 - protein, 10 aa, Artificial Sequence
  source: /note="Description of Artificial Sequence: Synthetic peptide"
QMWAPQWGPD

SEQ ID NO: 1944 - protein, 6 aa, Artificial Sequence
  source: /note="Description of Artificial Sequence: Synthetic peptide"
RGNRQA

SEQ ID NO: 1945 - protein, 6 aa, Artificial Sequence
  source: /note="Description of Artificial Sequence: Synthetic peptide"
SSSTDP

SEQ ID NO: 1946 - protein, 6 aa, Artificial Sequence
  source: /note="Description of Artificial Sequence: Synthetic peptide"
SSNTAP

SEQ ID NO: 1947 - protein, 6 aa, Artificial Sequence
  source: /note="Description of Artificial Sequence: Synthetic peptide"
SNSNLP

SEQ ID NO: 1948 - protein, 6 aa, Artificial Sequence
  source: /note="Description of Artificial Sequence: Synthetic peptide"
SSTTAP

SEQ ID NO: 1949 - protein, 6 aa, Artificial Sequence
  source: /note="Description of Artificial Sequence: Synthetic peptide"
AANTAA

SEQ ID NO: 1950 - protein, 6 aa, Artificial Sequence
  source: /note="Description of Artificial Sequence: Synthetic peptide"
QQNTAP

SEQ ID NO: 1951 - protein, 6 aa, Artificial Sequence
  source: /note="Description of Artificial Sequence: Synthetic peptide"
SAQAQA

SEQ ID NO: 1952 - protein, 6 aa, Artificial Sequence
  source: /note="Description of Artificial Sequence: Synthetic peptide"
QANTGP

SEQ ID NO: 1953 - protein, 6 aa, Artificial Sequence
  source: /note="Description of Artificial Sequence: Synthetic peptide"
NATTAP

SEQ ID NO: 1954 - protein, 6 aa, Artificial Sequence
  source: /note="Description of Artificial Sequence: Synthetic peptide"
SSTAGP

SEQ ID NO: 1955 - protein, 6 aa, Artificial Sequence
  source: /note="Description of Artificial Sequence: Synthetic peptide"
QQNTAA

SEQ ID NO: 1956 - protein, 6 aa, Artificial Sequence
  source: /note="Description of Artificial Sequence: Synthetic peptide"
PSTAGP

SEQ ID NO: 1957 - protein, 6 aa, Artificial Sequence
  source: /note="Description of Artificial Sequence: Synthetic peptide"
NQNTAP

SEQ ID NO: 1958 - protein, 6 aa, Artificial Sequence
  source: /note="Description of Artificial Sequence: Synthetic peptide"
QAANAP

SEQ ID NO: 1959 - protein, 6 aa, Artificial Sequence
  source: /note="Description of Artificial Sequence: Synthetic peptide"
SIVGLP

SEQ ID NO: 1960 - protein, 6 aa, Artificial Sequence
  source: /note="Description of Artificial Sequence: Synthetic peptide"
AASTAA

SEQ ID NO: 1961 - protein, 6 aa, Artificial Sequence
  source: /note="Description of Artificial Sequence: Synthetic peptide"
SQNTTA

SEQ ID NO: 1962 - protein, 6 aa, Artificial Sequence
  source: /note="Description of Artificial Sequence: Synthetic peptide"
QQDTAP

SEQ ID NO: 1963 - protein, 6 aa, Artificial Sequence
  source: /note="Description of Artificial Sequence: Synthetic peptide"
QTNTGP

SEQ ID NO: 1964 - protein, 6 aa, Artificial Sequence
  source: /note="Description of Artificial Sequence: Synthetic peptide"
QTNGAP

SEQ ID NO: 1965 - protein, 6 aa, Artificial Sequence
  source: /note="Description of Artificial Sequence: Synthetic peptide"
QQNAAP

SEQ ID NO: 1966 - protein, 6 aa, Artificial Sequence
  source: /note="Description of Artificial Sequence: Synthetic peptide"
AANTQA

SEQ ID NO: 1967 - protein, 6 aa, Artificial Sequence
  source: /note="Description of Artificial Sequence: Synthetic peptide"
NGRAHA

SEQ ID NO: 1968 - protein, 7 aa, Artificial Sequence
  source: /note="Description of Artificial Sequence: Synthetic peptide"
QPEHSST

SEQ ID NO: 1969 - protein, 7 aa, Artificial Sequence
  source: /note="Description of Artificial Sequence: Synthetic peptide"
VNTANST

SEQ ID NO: 1970 - protein, 7 aa, Artificial Sequence
  source: /note="Description of Artificial Sequence: Synthetic peptide"
HGPMQKS

SEQ ID NO: 1971 - protein, 7 aa, Artificial Sequence
  source: /note="Description of Artificial Sequence: Synthetic peptide"
PHKPPLA

SEQ ID NO: 1972 - protein, 7 aa, Artificial Sequence
  source: /note="Description of Artificial Sequence: Synthetic peptide"
IKNNEMW

SEQ ID NO: 1973 - protein, 7 aa, Artificial Sequence
  source: /note="Description of Artificial Sequence: Synthetic peptide"
RNLDTPM

SEQ ID NO: 1974 - protein, 7 aa, Artificial Sequence
  source: /note="Description of Artificial Sequence: Synthetic peptide"
VDSHRQS

SEQ ID NO: 1975 - protein, 7 aa, Artificial Sequence
  source: /note="Description of Artificial Sequence: Synthetic peptide"
YDSKTKT

SEQ ID NO: 1976 - protein, 7 aa, Artificial Sequence
  source: /note="Description of Artificial Sequence: Synthetic peptide"
SQLPHQK

SEQ ID NO: 1977 - protein, 7 aa, Artificial Sequence
  source: /note="Description of Artificial Sequence: Synthetic peptide"
STMQQNT

SEQ ID NO: 1978 - protein, 7 aa, Artificial Sequence
  source: /note="Description of Artificial Sequence: Synthetic peptide"
TERYMTQ

SEQ ID NO: 1979 - protein, 7 aa, Artificial Sequence
  source: /note="Description of Artificial Sequence: Synthetic peptide"
DASLSTS

SEQ ID NO: 1980 - protein, 7 aa, Artificial Sequence
  source: /note="Description of Artificial Sequence: Synthetic peptide"
DLPNKKT

SEQ ID NO: 1981 - protein, 7 aa, Artificial Sequence
  source: /note="Description of Artificial Sequence: Synthetic peptide"
DLTAARL

SEQ ID NO: 1982 - protein, 7 aa, Artificial Sequence
  source: /note="Description of Artificial Sequence: Synthetic peptide"
EPHQFNY

SEQ ID NO: 1983 - protein, 7 aa, Artificial Sequence
  source: /note="Description of Artificial Sequence: Synthetic peptide"
EPQSNHT

SEQ ID NO: 1984 - protein, 7 aa, Artificial Sequence
  source: /note="Description of Artificial Sequence: Synthetic peptide"
MSSWPSQ

SEQ ID NO: 1985 - protein, 7 aa, Artificial Sequence
  source: /note="Description of Artificial Sequence: Synthetic peptide"
NPKHNAT

SEQ ID NO: 1986 - protein, 7 aa, Artificial Sequence
  source: /note="Description of Artificial Sequence: Synthetic peptide"
PDGMRTT

SEQ ID NO: 1987 - protein, 7 aa, Artificial Sequence
  source: /note="Description of Artificial Sequence: Synthetic peptide"
PNNNKTT

SEQ ID NO: 1988 - protein, 7 aa, Artificial Sequence
  source: /note="Description of Artificial Sequence: Synthetic peptide"
QSTTHDS

SEQ ID NO: 1989 - protein, 7 aa, Artificial Sequence
  source: /note="Description of Artificial Sequence: Synthetic peptide"
TGSKQKQ

SEQ ID NO: 1990 - protein, 7 aa, Artificial Sequence
  source: /note="Description of Artificial Sequence: Synthetic peptide"
SLKHQAL

SEQ ID NO: 1991 - protein, 7 aa, Artificial Sequence
  source: /note="Description of Artificial Sequence: Synthetic peptide"
SPIDGEQ

SEQ ID NO: 1992 - protein, 8 aa, Artificial Sequence
  source: /note="Description of Artificial Sequence: Synthetic peptide"
WIFPWIQL

SEQ ID NO: 1993 - protein, 9 aa, Artificial Sequence
  source: /note="Description of Artificial Sequence: Synthetic peptide"
CDCRGDCFC

SEQ ID NO: 1994 - protein, 5 aa, Artificial Sequence
  source: /note="Description of Artificial Sequence: Synthetic peptide"
CNGRC

SEQ ID NO: 1995 - protein, 7 aa, Artificial Sequence
  source: /note="Description of Artificial Sequence: Synthetic peptide"
CPRECES

SEQ ID NO: 1996 - protein, 10 aa, Artificial Sequence
  source: /note="Description of Artificial Sequence: Synthetic peptide"
CTTHWGFTLC

SEQ ID NO: 1997 - protein, 9 aa, Artificial Sequence
  source: /note="Description of Artificial Sequence: Synthetic peptide"
CGRRAGGSC

SEQ ID NO: 1998 - protein, 9 aa, Artificial Sequence
  source: /note="Description of Artificial Sequence: Synthetic peptide"
CKGGRAKDC

SEQ ID NO: 1999 - protein, 9 aa, Artificial Sequence
  source: /note="Description of Artificial Sequence: Synthetic peptide"
CVPELGHEC

SEQ ID NO: 2000 - protein, 9 aa, Artificial Sequence
  source: /note="Description of Artificial Sequence: Synthetic peptide"
CRRETAWAK

SEQ ID NO: 2001 - protein, 14 aa, Artificial Sequence
  source: /note="Description of Artificial Sequence: Synthetic peptide"
VSWFSHRYSPFAVS

SEQ ID NO: 2002 - protein, 13 aa, Artificial Sequence
  source: /note="Description of Artificial Sequence: Synthetic peptide"
GYRDGYAGPILYN

SEQ ID NO: 2003 - protein, 7 aa, Artificial Sequence
  source: /note="Description of Artificial Sequence: Synthetic peptide"
  MOD_RES (1)..(3): Any naturally occurring amino acid
  MOD_RES (5)..(7): Any naturally occurring amino acid
XXXYXXX

SEQ ID NO: 2004 - protein, 4 aa, Artificial Sequence
  source: /note="Description of Artificial Sequence: Synthetic peptide"
  VARIANT (2)..(2): /replace="Met"
  SITE (1)..(4): /note="Variant residues given in the sequence have no preference with respect to those in the annotations for variant positions"
YENW

SEQ ID NO: 2005 - protein, 7 aa, Artificial Sequence
  source: /note="Description of Artificial Sequence: Synthetic peptide"
RPLPPLP

SEQ ID NO: 2006 - protein, 7 aa, Artificial Sequence
  source: /note="Description of Artificial Sequence: Synthetic peptide"
APPLPPR

SEQ ID NO: 2007 - protein, 12 aa, Artificial Sequence
  source: /note="Description of Artificial Sequence: Synthetic peptide"
DVFYPYPYASGS

SEQ ID NO: 2008 - protein, 6 aa, Artificial Sequence
  source: /note="Description of Artificial Sequence: Synthetic peptide"
MYWYPY

SEQ ID NO: 2009 - protein, 12 aa, Artificial Sequence
  source: /note="Description of Artificial Sequence: Synthetic peptide"
DITWDQLWDLMK

SEQ ID NO: 2010 - protein, 8 aa, Artificial Sequence
  source: /note="Description of Artificial Sequence: Synthetic peptide"
  VARIANT (5)..(5): /replace="Leu"
  SITE (1)..(8): /note="Variant residues given in the sequence have no preference with respect to those in the annotations for variant positions"
CWDDGWLC

SEQ ID NO: 2011 - protein, 14 aa, Artificial Sequence
  source: /note="Description of Artificial Sequence: Synthetic peptide"
EWCEYLGGYLRCYA

SEQ ID NO: 2012 - protein, 14 aa, Artificial Sequence
  source: /note="Description of Artificial Sequence: Synthetic peptide"
  MOD_RES (2)..(2): Any naturally occurring amino acid
  MOD_RES (4)..(5): Any naturally occurring amino acid
  MOD_RES (8)..(8): Any naturally occurring amino acid
  MOD_RES (11)..(11): Any naturally occurring amino acid
  MOD_RES (13)..(13): Any naturally occurring amino acid
YXCXXGPXTWXCXP

SEQ ID NO: 2013 - protein, 14 aa, Artificial Sequence
  source: /note="Description of Artificial Sequence: Synthetic peptide"
IEGPTLRQWLAARA

SEQ ID NO: 2014 - protein, 5 aa, Artificial Sequence
  source: /note="Description of Artificial Sequence: Synthetic peptide"
  MOD_RES (3)..(5): Any naturally occurring amino acid
LWXXX

SEQ ID NO: 2015 - protein, 7 aa, Artificial Sequence
  source: /note="Description of Artificial Sequence: Synthetic peptide"
  MOD_RES (1)..(1): Any naturally occurring amino acid
  MOD_RES (3)..(4): Any naturally occurring amino acid
XFXXYLW

SEQ ID NO: 2016 - protein, 13 aa, Artificial Sequence
  source: /note="Description of Artificial Sequence: Synthetic peptide"
SSIISHFRWGLCD

SEQ ID NO: 2017 - protein, 13 aa, Artificial Sequence
  source: /note="Description of Artificial Sequence: Synthetic peptide"
MSRPACPPNDKYE

SEQ ID NO: 2018 - protein, 8 aa, Artificial Sequence
  source: /note="Description of Artificial Sequence: Synthetic peptide"
CLRSGRGC

SEQ ID NO: 2019 - protein, 9 aa, Artificial Sequence
  source: /note="Description of Artificial Sequence: Synthetic peptide"
CHWMFSPWC

SEQ ID NO: 2020 - protein, 4 aa, Artificial Sequence
  source: /note="Description of Artificial Sequence: Synthetic peptide"
  MOD_RES (2)..(3): Any naturally occurring amino acid
WXXF

SEQ ID NO: 2021 - protein, 8 aa, Artificial Sequence
  source: /note="Description of Artificial Sequence: Synthetic peptide"
CSSRLDAC

SEQ ID NO: 2022 - protein, 7 aa, Artificial Sequence
  source: /note="Description of Artificial Sequence: Synthetic peptide"
CLPVASC

SEQ ID NO: 2023 - protein, 13 aa, Artificial Sequence
  source: /note="Description of Artificial Sequence: Synthetic peptide"
CGFECVRQCPERC

SEQ ID NO: 2024 - protein, 13 aa, Artificial Sequence
  source: /note="Description of Artificial Sequence: Synthetic peptide"
CVALCREACGEGC

SEQ ID NO: 2025 - protein, 9 aa, Artificial Sequence
  source: /note="Description of Artificial Sequence: Synthetic peptide"
SWCEPGWCR

SEQ ID NO: 2026 - protein, 7 aa, Artificial Sequence
  source: /note="Description of Artificial Sequence: Synthetic peptide"
YSGKWGW

SEQ ID NO: 2027 - protein, 7 aa, Artificial Sequence
  source: /note="Description of Artificial Sequence: Synthetic peptide"
GLSGGRS

SEQ ID NO: 2028 - protein, 7 aa, Artificial Sequence
  source: /note="Description of Artificial Sequence: Synthetic peptide"
LMLPRAD

SEQ ID NO: 2029 - protein, 9 aa, Artificial Sequence
  source: /note="Description of Artificial Sequence: Synthetic peptide"
CSCFRDVCC

SEQ ID NO: 2030 - protein, 9 aa, Artificial Sequence
  source: /note="Description of Artificial Sequence: Synthetic peptide"
CRDVVSVIC

SEQ ID NO: 2031 - protein, 6 aa, Artificial Sequence
  source: /note="Description of Artificial Sequence: Synthetic peptide"
MARSGL

SEQ ID NO: 2032 - protein, 6 aa, Artificial Sequence
  source: /note="Description of Artificial Sequence: Synthetic peptide"
MARAKE

SEQ ID NO: 2033 - protein, 6 aa, Artificial Sequence
  source: /note="Description of Artificial Sequence: Synthetic peptide"
MSRTMS

SEQ ID NO: 2034 - protein, 6 aa, Artificial Sequence
  source: /note="Description of Artificial Sequence: Synthetic peptide"
KCCYSL

SEQ ID NO: 2035 - protein, 14 aa, Artificial Sequence
  source: /note="Description of Artificial Sequence: Synthetic peptide"
MYWGDSHWLQYWYE

SEQ ID NO: 2036 - protein, 7 aa, Artificial Sequence
  source: /note="Description of Artificial Sequence: Synthetic peptide"
MQLPLAT

SEQ ID NO: 2037 - protein, 4 aa, Artificial Sequence
  source: /note="Description of Artificial Sequence: Synthetic peptide"
EWLS

SEQ ID NO: 2038 - protein, 4 aa, Artificial Sequence
  source: /note="Description of Artificial Sequence: Synthetic peptide"
SNEW

SEQ ID NO: 2039 - protein, 4 aa, Artificial Sequence
  source: /note="Description of Artificial Sequence: Synthetic peptide"
TNYL

SEQ ID NO: 2040 - protein, 12 aa, Artificial Sequence
  source: /note="Description of Artificial Sequence: Synthetic peptide"
WDLAWMFRLPVG

SEQ ID NO: 2041 - protein, 13 aa, Artificial Sequence
  source: /note="Description of Artificial Sequence: Synthetic peptide"
CTVALPGGYVRVC

SEQ ID NO: 2042 - protein, 13 aa, Artificial Sequence
  source: /note="Description of Artificial Sequence: Synthetic peptide"
CVAYCIEHHCWTC

SEQ ID NO: 2043 - protein, 12 aa, Artificial Sequence
  source: /note="Description of Artificial Sequence: Synthetic peptide"
CVFAHNYDYLVC

SEQ ID NO: 2044 - protein, 10 aa, Artificial Sequence
  source: /note="Description of Artificial Sequence: Synthetic peptide"
CVFTSNYAFC

SEQ ID NO: 2045 - protein, 7 aa, Artificial Sequence
  source: /note="Description of Artificial Sequence: Synthetic peptide"
VHSPNKK

SEQ ID NO: 2046 - protein, 7 aa, Artificial Sequence
  source: /note="Description of Artificial Sequence: Synthetic peptide"
CRGDGWC

SEQ ID NO: 2047 - protein, 6 aa, Artificial Sequence
  source: /note="Description of Artificial Sequence: Synthetic peptide"
  MOD_RES (1)..(1): Any naturally occurring amino acid
  MOD_RES (6)..(6): Any naturally occurring amino acid
XRGCDX

SEQ ID NO: 2048 - protein, 4 aa, Artificial Sequence
  source: /note="Description of Artificial Sequence: Synthetic peptide"
  MOD_RES (2)..(4): Any naturally occurring amino acid
PXXX

SEQ ID NO: 2049 - protein, 11 aa, Artificial Sequence
  source: /note="Description of Artificial Sequence: Synthetic peptide"
SGKGPRQITAL

SEQ ID NO: 2050 - protein, 14 aa, Artificial Sequence
  source: /note="Description of Artificial Sequence: Synthetic peptide"
  VARIANT (10)..(10): /replace="Gln"
  VARIANT (11)..(11): /replace="Ala"
  MOD_RES (12)..(14): Any naturally occurring amino acid
  SITE (1)..(14): /note="Variant residues given in the sequence have no preference with respect to those in the annotations for variant positions"
AAAAAAAAAANXXX

SEQ ID NO: 2051 - protein, 6 aa, Artificial Sequence
  source: /note="Description of Artificial Sequence: Synthetic peptide"
VYMSPF

SEQ ID NO: 2052 - protein, 7 aa, Artificial Sequence
  source: /note="Description of Artificial Sequence: Synthetic peptide"
ATWLPPR

SEQ ID NO: 2053 - protein, 12 aa, Artificial Sequence
  source: /note="Description of Artificial Sequence: Synthetic peptide"
HTMYYHHYQHHL

SEQ ID NO: 2054 - protein, 19 aa, Artificial Sequence
  source: /note="Description of Artificial Sequence: Synthetic peptide"
SEVGCRAGPLQWLCEKYFG

SEQ ID NO: 2055 - protein, 18 aa, Artificial Sequence
  source: /note="Description of Artificial Sequence: Synthetic peptide"
CGLLPVGRPDRNVWRWLC

SEQ ID NO: 2056 - protein, 15 aa, Artificial Sequence
  source: /note="Description of Artificial Sequence: Synthetic peptide"
CKGQCDRFKGLPWEC

SEQ ID NO: 2057 - protein, 5 aa, Artificial Sequence
  source: /note="Description of Artificial Sequence: Synthetic peptide"
SGRSA

SEQ ID NO: 2058 - protein, 4 aa, Artificial Sequence
  source: /note="Description of Artificial Sequence: Synthetic peptide"
WGFP

SEQ ID NO: 2059 - protein, 17 aa, Artificial Sequence
  source: /note="Description of Artificial Sequence: Synthetic peptide"
AEPMPHSLNFSQYLWYT

SEQ ID NO: 2060 - protein, 6 aa, Artificial Sequence
  source: /note="Description of Artificial Sequence: Synthetic peptide"
  VARIANT (4)..(4): /replace="Phe"
  SITE (1)..(6): /note="Variant residues given in the sequence have no preference with respect to those in the annotations for variant positions"
WAYWSP

SEQ ID NO: 2061 - protein, 7 aa, Artificial Sequence
  source: /note="Description of Artificial Sequence: Synthetic peptide"
IELLQAR

SEQ ID NO: 2062 - protein, 16 aa, Artificial Sequence
  source: /note="Description of Artificial Sequence: Synthetic peptide"
AYTKCSRQWRTCMTTH

SEQ ID NO: 2063 - protein, 15 aa, Artificial Sequence
  source: /note="Description of Artificial Sequence: Synthetic peptide"
PQNSKIPGPTFLDPH

SEQ ID NO: 2064 - protein, 15 aa, Artificial Sequence
  source: /note="Description of Artificial Sequence: Synthetic peptide"
SMEPALPDWWWKMFK

SEQ ID NO: 2065 - protein, 16 aa, Artificial Sequence
  source: /note="Description of Artificial Sequence: Synthetic peptide"
ANTPCGPYTHDCPVKR

SEQ ID NO: 2066 - protein, 12 aa, Artificial Sequence
  source: /note="Description of Artificial Sequence: Synthetic peptide"
TACHQHVRMVRP

SEQ ID NO: 2067 - protein, 12 aa, Artificial Sequence
  source: /note="Description of Artificial Sequence: Synthetic peptide"
VPWMEPAYQRFL

SEQ ID NO: 2068 - protein, 8 aa, Artificial Sequence
  source: /note="Description of Artificial Sequence: Synthetic peptide"
DPRATPGS

SEQ ID NO: 2069 - protein, 12 aa, Artificial Sequence
  source: /note="Description of Artificial Sequence: Synthetic peptide"
FRPNRAQDYNTN

SEQ ID NO: 2070 - protein, 9 aa, Artificial Sequence
  source: /note="Description of Artificial Sequence: Synthetic peptide"
CTKNSYLMC

SEQ ID NO: 2071 - protein, 11 aa, Artificial Sequence
  source: /note="Description of Artificial Sequence: Synthetic peptide"
  VARIANT (2)..(2): /replace="Arg"
  VARIANT (3)..(3): /replace="Arg"
  VARIANT (5)..(5): /replace="Asn"
  MOD_RES (6)..(7): Any amino acid
  VARIANT (9)..(9): /replace="Val"
  SITE (1)..(11): /note="Variant residues given in the sequence have no preference with respect to those in the annotations for variant positions"
CQLTGXXGAGC

SEQ ID NO: 2072 - protein, 9 aa, Artificial Sequence
  source: /note="Description of Artificial Sequence: Synthetic peptide"
CPIEDRPMC

SEQ ID NO: 2073 - protein, 12 aa, Artificial Sequence
  source: /note="Description of Artificial Sequence: Synthetic peptide"
HEWSYLAPYPWF

SEQ ID NO: 2074 - protein, 9 aa, Artificial Sequence
  source: /note="Description of Artificial Sequence: Synthetic peptide"
MCPKHPLGC

SEQ ID NO: 2075 - protein, 15 aa, Artificial Sequence
  source: /note="Description of Artificial Sequence: Synthetic peptide"
RMWPSSTVNLSAGRR

SEQ ID NO: 2076 - protein, 20 aa, Artificial Sequence
  source: /note="Description of Artificial Sequence: Synthetic peptide"
SAKTAVSQRVWLPSHRGGEP

SEQ ID NO: 2077 - protein, 20 aa, Artificial Sequence
  source: /note="Description of Artificial Sequence: Synthetic peptide"
KSREHVNNSACPSKRITAAL

SEQ ID NO: 2078 - protein, 4 aa, Artificial Sequence
  source: /note="Description of Artificial Sequence: Synthetic peptide"
EGFR

SEQ ID NO: 2079 - protein, 6 aa, Artificial Sequence
  source: /note="Description of Artificial Sequence: Synthetic peptide"
AGLGVR

SEQ ID NO: 2080 - protein, 15 aa, Artificial Sequence
  source: /note="Description of Artificial Sequence: Synthetic peptide"
GTRQGHTMRLGVSDG

SEQ ID NO: 2081 - protein, 15 aa, Artificial Sequence
  source: /note="Description of Artificial Sequence: Synthetic peptide"
IAGLATPGWSHWLAL

SEQ ID NO: 2082 - protein, 7 aa, Artificial Sequence
  source: /note="Description of Artificial Sequence: Synthetic peptide"
SMSIARL

SEQ ID NO: 2083 - protein, 7 aa, Artificial Sequence
  source: /note="Description of Artificial Sequence: Synthetic peptide"
HTFEPGV

SEQ ID NO: 2084 - protein, 15 aa, Artificial Sequence
  source: /note="Description of Artificial Sequence: Synthetic peptide"
NTSLKRISNKRIRRK

SEQ ID NO: 2085 - protein, 15 aa, Artificial Sequence
  source: /note="Description of Artificial Sequence: Synthetic peptide"
LRIKRKRRKRKKTRK

SEQ ID NO: 2086 - DNA, 21 bp, Adeno-associated virus 2
  modified_base (3)..(3): a, c, t, or g
agnvvmdcaggarscascaac

SEQ ID NO: 2087 - protein, 7 aa, Artificial Sequence
  source: /note="Description of Artificial Sequence: Synthetic peptide"
SDSGASN

SEQ ID NO: 2088 - protein, 7 aa, Artificial Sequence
  source: /note="Description of Artificial Sequence: Synthetic peptide"
SPSGASN

SEQ ID NO: 2089 - protein, 7 aa, Artificial Sequence
  source: /note="Description of Artificial Sequence: Synthetic peptide"
SHSGASN

SEQ ID NO: 2090 - protein, 7 aa, Artificial Sequence
  source: /note="Description of Artificial Sequence: Synthetic peptide"
SRSGASN

SEQ ID NO: 2091 - protein, 7 aa, Artificial Sequence
  source: /note="Description of Artificial Sequence: Synthetic peptide"
SKSGASN

SEQ ID NO: 2092 - protein, 7 aa, Artificial Sequence
  source: /note="Description of Artificial Sequence: Synthetic peptide"
SNSGASN

SEQ ID NO: 2093 - protein, 7 aa, Artificial Sequence
  source: /note="Description of Artificial Sequence: Synthetic peptide"
SGSGASN

SEQ ID NO: 2094 - protein, 7 aa, Artificial Sequence
  source: /note="Description of Artificial Sequence: Synthetic peptide"
SASGASN

SEQ ID NO: 2095 - protein, 7 aa, Artificial Sequence
  source: /note="Description of Artificial Sequence: Synthetic peptide"
SESGTSN

SEQ ID NO: 2096 - protein, 7 aa, Artificial Sequence
  source: /note="Description of Artificial Sequence: Synthetic peptide"
STTGGSN

SEQ ID NO: 2097 - protein, 7 aa, Artificial Sequence
  source: /note="Description of Artificial Sequence: Synthetic peptide"
SSAGSTN

SEQ ID NO: 2098 - protein, 6 aa, Artificial Sequence
  source: /note="Description of Artificial Sequence: Synthetic peptide"
NNDSQA

SEQ ID NO: 2099 - protein, 6 aa, Artificial Sequence
  source: /note="Description of Artificial Sequence: Synthetic peptide"
NNRNQA

SEQ ID NO: 2100 - protein, 6 aa, Artificial Sequence
  source: /note="Description of Artificial Sequence: Synthetic peptide"
NNNKQA

SEQ ID NO: 2101 - protein, 6 aa, Artificial Sequence
  source: /note="Description of Artificial Sequence: Synthetic peptide"
NAKRQA

SEQ ID NO: 2102 - protein, 6 aa, Artificial Sequence
  source: /note="Description of Artificial Sequence: Synthetic peptide"
NDEHQA

SEQ ID NO: 2103 - protein, 6 aa, Artificial Sequence
  source: /note="Description of Artificial Sequence: Synthetic peptide"
NTSQKA

SEQ ID NO: 2104 - protein, 25 aa, Artificial Sequence
  source: /note="Description of Artificial Sequence: Synthetic peptide"
YYLSRTNTPSGTDTQSRLVFSQAGA

SEQ ID NO: 2105 - protein, 25 aa, Artificial Sequence
  source: /note="Description of Artificial Sequence: Synthetic peptide"
YYLSRTNTDSGTETQSGLDFSQAGA

SEQ ID NO: 2106 - protein, 25 aa, Artificial Sequence
  source: /note="Description of Artificial Sequence: Synthetic peptide"
YYLSRTNTESGTPTQSALEFSQAGA

SEQ ID NO: 2107 - protein, 25 aa, Artificial Sequence
  source: /note="Description of Artificial Sequence: Synthetic peptide"
YYLSRTNTHSGTHTQSPLHFSQAGA

SEQ ID NO: 2108 - protein, 25 aa, Artificial Sequence
  source: /note="Description of Artificial Sequence: Synthetic peptide"
YYLSRTNTSSGTITISHLIFSQAGA

SEQ ID NO: 2109 - protein, 25 aa, Artificial Sequence
  source: /note="Description of Artificial Sequence: Synthetic peptide"
YYLSRTNTRSGIMTKSSLMFSQAGA

SEQ ID NO: 2110 - protein, 25 aa, Artificial Sequence
  source: /note="Description of Artificial Sequence: Synthetic peptide"
YYLSRTNTKSGRKTLSNLSFSQAGA

SEQ ID NO: 2111 - protein, 25 aa, Artificial Sequence
  source: /note="Description of Artificial Sequence: Synthetic peptide"
YYLSRTNDGSGPVTPSKLRFSQRGA

SEQ ID NO: 2112 - protein, 25 aa, Artificial Sequence
  source: /note="Description of Artificial Sequence: Synthetic peptide"
YYLSRTNAASGHATHSDLKFSQPGA

SEQ ID NO: 2113 - protein, 25 aa, Artificial Sequence
  source: /note="Description of Artificial Sequence: Synthetic peptide"
YYLSRTNGQAGSLTMSELGFSQVGA

SEQ ID NO: 2114 - protein, 25 aa, Artificial Sequence
  source: /note="Description of Artificial Sequence: Synthetic peptide"
YYLSRTNSTGGNQTTSQLLFSQLSA

SEQ ID NO: 2115 - protein, 25 aa, Artificial Sequence
  source: /note="Description of Artificial Sequence: Synthetic peptide"
YFLSRTNNNTGLNTNSTLNFSQGRA

SEQ ID NO: 2116 - protein, 16 aa, Artificial Sequence
  source: /note="Description of Artificial Sequence: Synthetic peptide"
SKTGADNNNSEYSWTG

SEQ ID NO: 2117 - protein, 16 aa, Artificial Sequence
  source: /note="Description of Artificial Sequence: Synthetic peptide"
SKTDADNNNSEYSWTG

SEQ ID NO: 2118 - protein, 16 aa, Artificial Sequence
  source: /note="Description of Artificial Sequence: Synthetic peptide"
SKTEADNNNSEYSWTG

SEQ ID NO: 2119 - protein, 16 aa, Artificial Sequence
  source: /note="Description of Artificial Sequence: Synthetic peptide"
SKTPADNNNSEYSWTG

SEQ ID NO: 2120 - protein, 16 aa, Artificial Sequence
  source: /note="Description of Artificial Sequence: Synthetic peptide"
SKTHADNNNSEYSWTG

SEQ ID NO: 2121 - protein, 16 aa, Artificial Sequence
  source: /note="Description of Artificial Sequence: Synthetic peptide"
SKTQADNNNSEYSWTG

SEQ ID NO: 2122 - protein, 16 aa, Artificial Sequence
  source: /note="Description of Artificial Sequence: Synthetic peptide"
SKTIADNNNSEYSWTG

SEQ ID NO: 2123 - protein, 16 aa, Artificial Sequence
  source: /note="Description of Artificial Sequence: Synthetic peptide"
SKTMADNNNSEYSWTG

SEQ ID NO: 2124 - protein, 16 aa, Artificial Sequence
  source: /note="Description of Artificial Sequence: Synthetic peptide"
SKTRADNNNSEYSWTG

SEQ ID NO: 2125 - protein, 16 aa, Artificial Sequence
  source: /note="Description of Artificial Sequence: Synthetic peptide"
SKTNADNNNSEYSWTG

SEQ ID NO: 2126 - protein, 16 aa, Artificial Sequence
  source: /note="Description of Artificial Sequence: Synthetic peptide"
SKTVGRNNNSEYSWTG

SEQ ID NO: 2127 - protein, 16 aa, Artificial Sequence
  source: /note="Description of Artificial Sequence: Synthetic peptide"
SKTADRNNNSEYSWTG

SEQ ID NO: 2128 - protein, 16 aa, Artificial Sequence
  source: /note="Description of Artificial Sequence: Synthetic peptide"
SKKLSQNNNSKYSWQG

SEQ ID NO: 2129 - protein, 16 aa, Artificial Sequence
  source: /note="Description of Artificial Sequence: Synthetic peptide"
SKPTTGNNNSDYSWPG

SEQ ID NO: 2130 - protein, 16 aa, Artificial Sequence
  source: /note="Description of Artificial Sequence: Synthetic peptide"
STQKNENNNSNYSWPG

SEQ ID NO: 2131 - protein, 8 aa, Artificial Sequence
  source: /note="Description of Artificial Sequence: Synthetic peptide"
HKDDEGKF

SEQ ID NO: 2132 - protein, 8 aa, Artificial Sequence
  source: /note="Description of Artificial Sequence: Synthetic peptide"
HKDDNRKF

SEQ ID NO: 2133 - protein, 8 aa, Artificial Sequence
  source: /note="Description of Artificial Sequence: Synthetic peptide"
HKDDTNKF

SEQ ID NO: 2134 - protein, 8 aa, Artificial Sequence
  source: /note="Description of Artificial Sequence: Synthetic peptide"
HEDSDKNF

SEQ ID NO: 2135 - protein, 8 aa, Artificial Sequence
  source: /note="Description of Artificial Sequence: Synthetic peptide"
HRDGADSF

SEQ ID NO: 2136 - protein, 8 aa, Artificial Sequence
  source: /note="Description of Artificial Sequence: Synthetic peptide"
HGDNKSRF

SEQ ID NO: 2137 - protein, 14 aa, Artificial Sequence
  source: /note="Description of Artificial Sequence: Synthetic peptide"
KQGSEKTNVDFEEV

SEQ ID NO: 2138 - protein, 14 aa, Artificial Sequence
  source: /note="Description of Artificial Sequence: Synthetic peptide"
KQGSEKTNVDSEEV

SEQ ID NO: 2139 - protein, 14 aa, Artificial Sequence
  source: /note="Description of Artificial Sequence: Synthetic peptide"
KQGSEKTNVDVEEV

SEQ ID NO: 2140 - protein, 14 aa, Artificial Sequence
  source: /note="Description of Artificial Sequence: Synthetic peptide"
KQGSDKTNVDDAGV

SEQ ID NO: 2141 - protein, 14 aa, Artificial Sequence
  source: /note="Description of Artificial Sequence: Synthetic peptide"
KQGSSKTNVDPREV

SEQ ID NO: 2142 - protein, 14 aa, Artificial Sequence
  source: /note="Description of Artificial Sequence: Synthetic peptide"
KQGSRKTNVDHKQV

SEQ ID NO: 2143 - protein, 14 aa, Artificial Sequence
  source: /note="Description of Artificial Sequence: Synthetic peptide"
KQGSKGGNVDTNRV

SEQ ID NO: 2144 - protein, 14 aa, Artificial Sequence
  source: /note="Description of Artificial Sequence: Synthetic peptide"
KQGSGEANVDNGDV

SEQ ID NO: 2145 - protein, 14 aa, Artificial Sequence
  source: /note="Description of Artificial Sequence: Synthetic peptide"
KQDAAADNIDYDHV

SEQ ID NO: 2146 - protein, 14 aa, Artificial Sequence
  source: /note="Description of Artificial Sequence: Synthetic peptide"
KQSGTRSNAAASSV

SEQ ID NO: 2147 - protein, 14 aa, Artificial Sequence
  source: /note="Description of Artificial Sequence: Synthetic peptide"
KENTNTNDTELTNV

SEQ ID NO: 2148 - protein, 14 aa, Artificial Sequence
  source: /note="Description of Artificial Sequence: Synthetic peptide"
QRGNNVAATADVNT

SEQ ID NO: 2149 - protein, 14 aa, Artificial Sequence
  source: /note="Description of Artificial Sequence: Synthetic peptide"
QRGNNEAATADVNT

SEQ ID NO: 2150 - protein, 14 aa, Artificial Sequence
  source: /note="Description of Artificial Sequence: Synthetic peptide"
QRGNNPAATADVNT

SEQ ID NO: 2151 - protein, 14 aa, Artificial Sequence
  source: /note="Description of Artificial Sequence: Synthetic peptide"
QRGNNHAATADVNT

SEQ ID NO: 2152 - protein, 14 aa, Artificial Sequence
  source: /note="Description of Artificial Sequence: Synthetic peptide"
QEENNIAATPGVNT

SEQ ID NO: 2153 - protein, 14 aa, Artificial Sequence
  source: /note="Description of Artificial Sequence: Synthetic peptide"
QPPNNMAATHEVNT

SEQ ID NO: 2154 - protein, 14 aa, Artificial Sequence
  source: /note="Description of Artificial Sequence: Synthetic peptide"
QHHNNSAATTIVNT

SEQ ID NO: 2155 - protein, 14 aa, Artificial Sequence
  source: /note="Description of Artificial Sequence: Synthetic peptide"
QTTNNRAAFNMVET

SEQ ID NO: 2156 - protein, 14 aa, Artificial Sequence
  source: /note="Description of Artificial Sequence: Synthetic peptide"
QKKNNNAASKKVAT

SEQ ID NO: 2157 - protein, 14 aa, Artificial Sequence
  source: /note="Description of Artificial Sequence: Synthetic peptide"
QGGNNKAADDAVKT

SEQ ID NO: 2158 - protein, 14 aa, Artificial Sequence
  source: /note="Description of Artificial Sequence: Synthetic peptide"
QAAKGGAADDAVKT

SEQ ID NO: 2159 - protein, 14 aa, Artificial Sequence
  source: /note="Description of Artificial Sequence: Synthetic peptide"
QDDRAAAANESVDT

SEQ ID NO: 2160 - protein, 14 aa, Artificial Sequence
  source: /note="Description of Artificial Sequence: Synthetic peptide"
QQQHDDAAYQRVHT

SEQ ID NO: 2161 - protein, 14 aa, Artificial Sequence
  source: /note="Description of Artificial Sequence: Synthetic peptide"
QSSSSLAAVSTVQT

SEQ ID NO: 2162 - protein, 14 aa, Artificial Sequence
  source: /note="Description of Artificial Sequence: Synthetic peptide"
QNNQTTAAIRNVTT

SEQ ID NO: 2163 - protein, 12 aa, Artificial Sequence
  source: /note="Description of Artificial Sequence: Synthetic peptide"
NYNKKSDNVDFT

SEQ ID NO: 2164 - protein, 12 aa, Artificial Sequence
  source: /note="Description of Artificial Sequence: Synthetic peptide"
NYNKKSENVDFT

SEQ ID NO: 2165 - protein, 12 aa, Artificial Sequence
  source: /note="Description of Artificial Sequence: Synthetic peptide"
NYNKKSLNVDFT

SEQ ID NO: 2166 - protein, 12 aa, Artificial Sequence
  source: /note="Description of Artificial Sequence: Synthetic peptide"
NYNKKSPNVDFT

SEQ ID NO: 2167 - protein, 12 aa, Artificial Sequence
  source: /note="Description of Artificial Sequence: Synthetic peptide"
NYSKKSHCVDFT

SEQ ID NO: 2168 - protein, 11 aa, Artificial Sequence
  source: /note="Description of Artificial Sequence: Synthetic peptide"
NYRKTIYVDFT

SEQ ID NO: 2169 - protein, 11 aa, Artificial Sequence
  source: /note="Description of Artificial Sequence: Synthetic peptide"
NYKEKKDVHFT

SEQ ID NO: 2170 - protein, 11 aa, Artificial Sequence
  source: /note="Description of Artificial Sequence: Synthetic peptide"
NYGHRAIVQFT

SEQ ID NO: 2171 - protein, 11 aa, Artificial Sequence
  source: /note="Description of Artificial Sequence: Synthetic peptide"
NYANHQFVVCT

SEQ ID NO: 2172 - protein, 12 aa, Artificial Sequence
  source: /note="Description of Artificial Sequence: Synthetic peptide"
NYDDDPTGVLLT

SEQ ID NO: 2173 - protein, 11 aa, Artificial Sequence
  source: /note="Description of Artificial Sequence: Synthetic peptide"
NYDDPTGVLLT

SEQ ID NO: 2174 - protein, 11 aa, Artificial Sequence
  source: /note="Description of Artificial Sequence: Synthetic peptide"
NFEQQNSVEWT

SEQ ID NO: 2175 - protein, 7 aa, Artificial Sequence
  source: /note="Description of Artificial Sequence: Synthetic peptide"
SQSGASN

SEQ ID NO: 2176 - protein, 6 aa, Artificial Sequence
  source: /note="Description of Artificial Sequence: Synthetic peptide"
NNGSQA

SEQ ID NO: 2177 - protein, 25 aa, Artificial Sequence
  source: /note="Description of Artificial Sequence: Synthetic peptide"
YYLSRTNTPSGTTTWSRLQFSQAGA

SEQ ID NO: 2178 - protein, 16 aa, Artificial Sequence
  source: /note="Description of Artificial Sequence: Synthetic peptide"
SKTSADNNNSEYSWTG

SEQ ID NO: 2179 - protein, 8 aa, Artificial Sequence
  source: /note="Description of Artificial Sequence: Synthetic peptide"
HKDDEEKF

SEQ ID NO: 2180 - protein, 14 aa, Artificial Sequence
  source: /note="Description of Artificial Sequence: Synthetic peptide"
KQGSEKTNVDIEEV

SEQ ID NO: 2181 - protein, 14 aa, Artificial Sequence
  source: /note="Description of Artificial Sequence: Synthetic peptide"
QRGNNQAATADVNT

SEQ ID NO: 2182 - protein, 12 aa, Artificial Sequence
  source: /note="Description of Artificial Sequence: Synthetic peptide"
NYNKKSVNVDFT

SEQ ID NO: 2183 - protein, 42 aa, Artificial Sequence
  source: /note="Description of Artificial Sequence: Synthetic polypeptide"
SQSGASNYNTPSGTTTQSRLQFSTSADNNNSEYSWTGATKYH

SEQ ID NO: 2184 - protein, 42 aa, Artificial Sequence
  source: /note="Description of Artificial Sequence: Synthetic polypeptide"
SASGASNFNSEGGSLTQSSLGFSTDGENNNSDFSWTGATKYH

SEQ ID NO: 2185 - protein, 42 aa, Artificial Sequence
  source: /note="Description of Artificial Sequence: Synthetic polypeptide"
SQSGASNYNTPSGTTTQSRLQFSTDGENNNSDFSWTGATKYH

SEQ ID NO: 2186 - protein, 42 aa, Artificial Sequence
  source: /note="Description of Artificial Sequence: Synthetic polypeptide"
SASGASNYNTPSGTTTQSRLQFSTSADNNNSEFSWPGATTYH

SEQ ID NO: 2187 - protein, 42 aa, Artificial Sequence
  source: /note="Description of Artificial Sequence: Synthetic polypeptide"
SQSGASNFNSEGGSLTQSSLGFSTDGENNNSDFSWTGATKYH

SEQ ID NO: 2188 - protein, 42 aa, Artificial Sequence
  source: /note="Description of Artificial Sequence: Synthetic polypeptide"
SASGASNYNTPSGSLTQSSLGFSTDGENNNSDFSWTGATKYH

SEQ ID NO: 2189 - protein, 42 aa, Artificial Sequence
  source: /note="Description of Artificial Sequence: Synthetic polypeptide"
SQSGASNYNTPSGTTTQSRLQFSTSADNNNSDFSWTGATKYH

SEQ ID NO: 2190 - protein, 42 aa, Artificial Sequence
  source: /note="Description of Artificial Sequence: Synthetic polypeptide"
SGAGASNFNSEGGSLTQSSLGFSTDGENNNSDFSWTGATKYH

SEQ ID NO: 2191 - protein, 7 aa, Artificial Sequence
  source: /note="Description of Artificial Sequence: Synthetic peptide"
SGAGASN

SEQ ID NO: 2192 - protein, 15 aa, Artificial Sequence
  source: /note="Description of Artificial Sequence: Synthetic peptide"
NSEGGSLTQSSLGFS

SEQ ID NO: 2193 - protein, 11 aa, Artificial Sequence
  source: /note="Description of Artificial Sequence: Synthetic peptide"
TDGENNNSDFS

SEQ ID NO: 2194 - protein, 10 aa, Artificial Sequence
  source: /note="Description of Artificial Sequence: Synthetic peptide"
SEFSWPGATT

SEQ ID NO: 2195 - protein, 13 aa, Artificial Sequence
  source: /note="Description of Artificial Sequence: Synthetic peptide"
TSADNNNSDFSWT

SEQ ID NO: 2196 - protein, 8 aa, Artificial Sequence
  source: /note="Description of Artificial Sequence: Synthetic peptide"
SQSGASNY

SEQ ID NO: 2197 - protein, 15 aa, Artificial Sequence
  source: /note="Description of Artificial Sequence: Synthetic peptide"
NTPSGTTTQSRLQFS

SEQ ID NO: 2198 - protein, 19 aa, Artificial Sequence
  source: /note="Description of Artificial Sequence: Synthetic peptide"
TSADNNNSEYSWTGATKYH

SEQ ID NO: 2199 - protein, 8 aa, Artificial Sequence
  source: /note="Description of Artificial Sequence: Synthetic peptide"
SASGASNF

SEQ ID NO: 2200 - protein, 19 aa, Artificial Sequence
  source: /note="Description of Artificial Sequence: Synthetic peptide"
TDGENNNSDFSWTGATKYH

SEQ ID NO: 2201 - protein, 8 aa, Artificial Sequence
  source: /note="Description of Artificial Sequence: Synthetic peptide"
SASGASNY

SEQ ID NO: 2202 - protein, 19 aa, Artificial Sequence
  source: /note="Description of Artificial Sequence: Synthetic peptide"
TSADNNNSEFSWPGATTYH

SEQ ID NO: 2203 - protein, 15 aa, Artificial Sequence
  source: /note="Description of Artificial Sequence: Synthetic peptide"
NTPSGSLTQSSLGFS

SEQ ID NO: 2204 - protein, 19 aa, Artificial Sequence
  source: /note="Description of Artificial Sequence: Synthetic peptide"
TSADNNNSDFSWTGATKYH

SEQ ID NO: 2205 - protein, 8 aa, Artificial Sequence
  source: /note="Description of Artificial Sequence: Synthetic peptide"
SGAGASNF

SEQ ID NO: 2206 - DNA, 48 bp, Artificial Sequence
  source: /note="Description of Artificial Sequence: Synthetic oligonucleotide"
  modified_base (20)..(20): a, c, t, or g
  modified_base (35)..(35): a, c, t, or g
ctccagvvsvvsmrsrvcvnsgcagctdhcvvsrnsgtcvmsacacaa

SEQ ID NO: 2207 - DNA, 48 bp, Artificial Sequence
  source: /note="Description of Artificial Sequence: Synthetic oligonucleotide"
ctccagagaggcaacagacaagcagctaccgcagatgtcaacacacaa

SEQ ID NO: 2208 - protein, 7 aa, Artificial Sequence
  source: /note="Description of Artificial Sequence: Synthetic peptide"
SAAGASN

SEQ ID NO: 2209 - protein, 24 aa, Artificial Sequence
  source: /note="Description of Artificial Sequence: Synthetic peptide"
YFLSRTNTESGSTTQSTLRFSQAG

SEQ ID NO: 2210 - protein, 13 aa, Artificial Sequence
  source: /note="Description of Artificial Sequence: Synthetic peptide"
SKTSADNNNSDFS

SEQ ID NO: 2211 - protein, 14 aa, Artificial Sequence
  source: /note="Description of Artificial Sequence: Synthetic peptide"
KQGSEKTDVDIDKV

SEQ ID NO: 2212 - protein, 7 aa, Artificial Sequence
  source: /note="Description of Artificial Sequence: Synthetic peptide"
STAGASN

SEQ ID NO: 2213 - protein, 24 aa, Artificial Sequence
  source: /note="Description of Artificial Sequence: Synthetic peptide"
YFLSRTNTTSGIETQSTLRFSQAG

SEQ ID NO: 2214 - protein, 13 aa, Artificial Sequence
  source: /note="Description of Artificial Sequence: Synthetic peptide"
SKTDGENNNSDFS

SEQ ID NO: 2215 - protein, 14 aa, Artificial Sequence
  source: /note="Description of Artificial Sequence: Synthetic peptide"
KQGAAADDVEIDGV

SEQ ID NO: 2216 - protein, 7 aa, Artificial Sequence
  source: /note="Description of Artificial Sequence: Synthetic peptide"
SEAGASN

SEQ ID NO: 2217 - protein, 24 aa, Artificial Sequence
  source: /note="Description of Artificial Sequence: Synthetic peptide"
YYLSRTNTPSGTTTQSRLQFSQAG

SEQ ID NO: 2218 - protein, 13 aa, Artificial Sequence
  source: /note="Description of Artificial Sequence: Synthetic peptide"
SKTSADNNNSEYS

SEQ ID NO: 2219 - protein, 14 aa, Artificial Sequence
  source: /note="Description of Artificial Sequence: Synthetic peptide"
KQGSEKTNVDIEKV

SEQ ID NO: 2220 - protein, 24 aa, Artificial Sequence
  source: /note="Description of Artificial Sequence: Synthetic peptide"
YFLSRTNDASGSDTKSTLLFSQAG

SEQ ID NO: 2221 - protein, 13 aa, Artificial Sequence
  source: /note="Description of Artificial Sequence: Synthetic peptide"
STTPSENNNSEYS

SEQ ID NO: 2222 - protein, 7 aa, Artificial Sequence
  source: /note="Description of Artificial Sequence: Synthetic peptide"
SAAGATN

SEQ ID NO: 2223 - protein, 24 aa, Artificial Sequence
  source: /note="Description of Artificial Sequence: Synthetic peptide"
YFLSRTNGEAGSATLSELRFSQAG

SEQ ID NO: 2224 - protein, 8 aa, Artificial Sequence
  source: /note="Description of Artificial Sequence: Synthetic peptide"
HGDDADRF

SEQ ID NO: 2225 - protein, 14 aa, Artificial Sequence
  source: /note="Description of Artificial Sequence: Synthetic peptide"
KQGAEKSDVEVDRV

SEQ ID NO: 2226 - protein, 14 aa, Artificial Sequence
  source: /note="Description of Artificial Sequence: Synthetic peptide"
KQDSGGDNIDIDQV

SEQ ID NO: 2227 - protein, 7 aa, Artificial Sequence
  source: /note="Description of Artificial Sequence: Synthetic peptide"
SDAGASN

SEQ ID NO: 2228 - protein, 24 aa, Artificial Sequence
  source: /note="Description of Artificial Sequence: Synthetic peptide"
YFLSRTNTEGGHDTQSTLRFSQAG

SEQ ID NO: 2229 - protein, 14 aa, Artificial Sequence
  source: /note="Description of Artificial Sequence: Synthetic peptide"
KEDGGGSDVAIDEV

SEQ ID NO: 2230 - protein, 7 aa, Artificial Sequence
  source: /note="Description of Artificial Sequence: Synthetic peptide"
SNAGASN

SEQ ID NO: 2231 - protein, 24 aa, Artificial Sequence
  source: /note="Description of Artificial Sequence: Synthetic peptide"
YFLSRTNGEAGSATLSELRFSQPG

SEQ ID NO: 2232 - DNA, 21 bp, Artificial Sequence
  source: /note="Description of Artificial Sequence: Synthetic oligonucleotide"
agcvvmdcaggarscascaac

SEQ ID NO: 2233 - DNA, 18 bp, Artificial Sequence
  source: /note="Description of Artificial Sequence: Synthetic oligonucleotide"
aacracrrsmrsmaggca

SEQ ID NO: 2234 - DNA, 24 bp, Artificial Sequence
  source: /note="Description of Artificial Sequence: Synthetic oligonucleotide"
cacrrggacrrcrmsrrsarsttt

SEQ ID NO: 2235 - DNA, 75 bp, Artificial Sequence
  source: /note="Description of Artificial Sequence: Synthetic oligonucleotide"
  modified_base (35)..(35): a, c, t, or g
tatttcttgagcagaacaaacrvcvvsrscggamncvhsacgmhstcavvscttvdsttttctcagsbcrgsgcg

SEQ ID NO: 2236 - DNA, 48 bp, Artificial Sequence
  source: /note="Description of Artificial Sequence: Synthetic oligonucleotide"
  modified_base (11)..(11): a, c, t, or g
tcaamammavnsrvcsrsaacaacaacagtrasttctcgtggmmagga

SEQ ID NO: 2237 - DNA, 42 bp, Artificial Sequence
  source: /note="Description of Artificial Sequence: Synthetic oligonucleotide"
  modified_base (31)..(31): a, c, t, or g
aagsaarrcrscrvsrvarvcratrycgmsnhcrvmvrsgtc

SEQ ID NO: 2238 - DNA, 42 bp, Artificial Sequence
  source: /note="Description of Artificial Sequence: Synthetic oligonucleotide"
  modified_base (17)..(17): a, c, t, or g
  modified_base (32)..(32): a, c, t, or g
cagvvsvvsmrsrvcvnsgcagctdhcvvsrnsgtcvmsaca

SEQ ID NO: 2239 - DNA, 33 bp, Artificial Sequence
  source: /note="Description of Artificial Sequence: Synthetic oligonucleotide"
aactwcrvsvasmvsvhsddtgtgswstksact

SEQ ID NO: 2240 - DNA, 30 bp, Artificial Sequence
  source: /note="Description of Artificial Sequence: Synthetic oligonucleotide"
ttgttgaacatcaccacgtgacgcacgttc

SEQ ID NO: 2241 - DNA, 30 bp, Artificial Sequence
  source: /note="Description of Artificial Sequence: Synthetic oligonucleotide"
tccccgtggttctactacataatgtggccg

SEQ ID NO: 2242 - DNA, 30 bp, Artificial Sequence
  source: /note="Description of Artificial Sequence: Synthetic oligonucleotide"
ttccacactccgttttggataatgttgaac

SEQ ID NO: 2243 - DNA, 30 bp, Artificial Sequence
  source: /note="Description of Artificial Sequence: Synthetic oligonucleotide"
agggacatccccagctccatgctgtggtcg

SEQ ID NO: 2244 - DNA, 30 bp, Artificial Sequence
  source: /note="Description of Artificial Sequence: Synthetic oligonucleotide"
agggacaacccctccgactcgccctaatcc

SEQ ID NO: 2245 - DNA, 30 bp, Artificial Sequence
  source: /note="Description of Artificial Sequence: Synthetic oligonucleotide"
tcctagtagaagacaccctctcactgcccg

SEQ ID NO: 2246 - DNA, 30 bp, Artificial Sequence
  source: /note="Description of Artificial Sequence: Synthetic oligonucleotide"
agtaccatgtacacccactctcccagtgcc

SEQ ID NO: 2247 - DNA, 30 bp, Artificial Sequence
  source: /note="Description of Artificial Sequence: Synthetic oligonucleotide"
atatggacgttcatgctgatcaccataccg

SEQ ID NO: 2248 - DNA, 30 bp, Artificial Sequence
  source: /note="Description of Artificial Sequence: Synthetic oligonucleotide"
agcaggagctccttggcctcagcgtgcgag

SEQ ID NO: 2249 - DNA, 30 bp, Artificial Sequence
  source: /note="Description of Artificial Sequence: Synthetic oligonucleotide"
acaagcagcttcactatgacaaccactgac

SEQ ID NO: 2250 - DNA, 284 bp, Artificial Sequence
  source: /note="Description of Artificial Sequence: Synthetic polynucleotide"
  modified_base (59)..(59): a, c, t, or g
  modified_base (244)..(244): a, c, t, or g
cagcctaggaactggcttcctggaccctgttaccgccagcagagagtctcaamammavnsrvcsrsaacaacaacagtrasttctcctggmmaggagctaccaagtaccacctcaatggcagagactctctggtgaatcccggaccagctatggcaagccacrrggacrrcrmsrrsarsttttttcctcagagcggggttctcatctttgggaagsaarrcrscrvsrvarvcratrycgmsnhcrvmvrsgtcatgattacagacgaagaggagatctggac

SEQ ID NO: 2251 - DNA, 34 bp, Artificial Sequence
  source: /note="Description of Artificial Sequence: Synthetic oligonucleotide"
tgggacaatggcggtcgtctctcagagttktkkt

SEQ ID NO: 2252 - DNA, 35 bp, Artificial Sequence
  source: /note="Description of Artificial Sequence: Synthetic oligonucleotide"
agaggacckktcctcgatggttcatggtggagtta

SEQ ID NO: 2253 - DNA, 31 bp, Artificial Sequence
  source: /note="Description of Artificial Sequence: Synthetic oligonucleotide"
ccacttagggcctggtcgataccgttcggtg

SEQ ID NO: 2254 - DNA, 32 bp, Artificial Sequence
  source: /note="Description of Artificial Sequence: Synthetic oligonucleotide"
tctcgccccaagagtagaaacccttcsttyyg

SEQ ID NO: 2255 - protein, 735 aa, Adeno-associated virus 2 [sequence omitted]

SEQ ID NO: 2256 - protein, 736 aa, Adeno-associated virus 9; identical to SEQ ID NO: 123

SEQ ID NO: 2257 - protein, 7 aa, Artificial Sequence
  source: /note="Description of Artificial Sequence: Synthetic peptide"
GSTPPPM

SEQ ID NO: 2258 - protein, 7 aa, Artificial Sequence
  source: /note="Description of Artificial Sequence: Synthetic peptide"
GETRAPL

SEQ ID NO: 2259 - protein, 6 aa, Artificial Sequence
  source: /note="Description of Artificial Sequence: Synthetic peptide"
SPAKFA

SEQ ID NO: 2260 - protein, 6 aa, Artificial Sequence
  source: /note="Description of Artificial Sequence: Synthetic peptide"
NKDKLN

SEQ ID NO: 2261 - DNA, 270 bp, Homo sapiens
  misc_feature (1)..(270): /note="This sequence may encompass 41-90 repeating 'cag' units"
  source: /note="See specification as filed for detailed description of substitutions and preferred embodiments"
cagcagcagcagcagcagcagcagcagcagcagcagcagcagcagcagcagcagcagcagcagcagcagcagcagcagcagcagcagcagcagcagcagcagcagcagcagcagcagcagcagcagcagcagcagcagcagcagcagcagcagcagcagcagcagcagcagcagcagcagcagcagcagcagcagcagcagcagcagcagcagcagcagcagcagcagcagcagcagcagcagcagcagcagcagcagcagcagcagcag

SEQ ID NO: 2262 - DNA, 120 bp, Homo sapiens
  misc_feature (1)..(120): /note="This sequence may encompass 36-40 repeating 'cag' units"
  source: /note="See specification as filed for detailed description of substitutions and preferred embodiments"
cagcagcagcagcagcagcagcagcagcagcagcagcagcagcagcagcagcagcagcagcagcagcagcagcagcagcagcagcagcagcagcagcagcagcagcagcagcagcagcag
